(19) United States
(12) Patent Application Publication
(10) Pub. No.: US 2023/0111150 A1
(43) Pub. Date: Apr. 13, 2023

(54) METHODS AND COMPOSITIONS FOR THE SPECIFIC INHIBITION OF KRAS BY ASYMMETRIC DOUBLE-STRANDED RNA

(71) Applicant: DICERNA PHARMACEUTICALS, INC., Lexington, MA (US)

(72) Inventor: Bob D. Brown, Millington, NJ (US)

(21) Appl. No.: 17/895,615

(22) Filed: Aug. 25, 2022

Related U.S. Application Data
(63) Continuation of application No. 16/908,313, filed on Jun. 22, 2020, now Pat. No. 11,447,777.
Application No. 16/908,313 is a division of application No. 15/800,440, filed on Nov. 1, 2017, now Pat. No. 10,752,899.
Application No. 15/800,440 is a continuation of application No. 14/531,913, filed on Nov. 3, 2014, now Pat. No. 9,809,819.
Application No. 14/531,913 is a division of application No. 13/738,024, filed on Jan. 10, 2013, now Pat. No. 9,200,284.
Application No. 13/738,024 is a division of application No. 12/754,427, filed on Apr. 5, 2010, now Pat. No. 8,372,816.
Application No. 12/754,427 is a continuation-in-part of application No. PCT/US2009/005214, filed on Sep. 17, 2009.
Application No. PCT/US2009/005214 is a continuation-in-part of application No. 12/642,264, filed on Dec. 18, 2009, now abandoned.
Application No. 12/642,264 is a continuation-in-part of application No. 12/642,404, filed on Dec. 18, 2009, now abandoned.
Application No. 12/642,404 is a continuation-in-part of application No. 12/642,371, filed on Dec. 18, 2009, now Pat. No. 8,513,207.
Application No. 12/642,371 is a continuation-in-part of application No. 12/704,256, filed on Feb. 11, 2010, now abandoned.
(60) Provisional application No. 61/309,266, filed on Mar. 1, 2010.
(60) Provisional application No. 61/285,925, filed on Dec. 11, 2009.
(60) Provisional application No. 61/257,810, filed on Nov. 3, 2009.
(60) Provisional application No. 61/257,820, filed on Nov. 3, 2009.
(60) Provisional application No. 61/184,735, filed on Jun. 5, 2009.
(60) Provisional application No. 61/183,818, filed on Jun. 3, 2009.
(60) Provisional application No. 61/183,815, filed on Jun. 3, 2009.
(60) Provisional application No. 61/174,306, filed on Apr. 30, 2009.
(60) Provisional application No. 61/174,279, filed on Apr. 30, 2009.
(60) Provisional application No. 61/166,578, filed on Apr. 3, 2009.
(60) Provisional application No. 61/166,559, filed on Apr. 3, 2009.
(60) Provisional application No. 61/151,841, filed on Feb. 11, 2009.

(51) Int. Cl. C12N 15/113; C07H 21/02

(52) U.S. Cl. CPC C12N 15/1135; C12N 15/113; C07H 21/02; C12N 2310/14; C12N 2310/321; C12N 2310/344; C12N 2310/322; C12N 2310/533; C12N 2320/52

(57) ABSTRACT

This invention relates to compounds, compositions, and methods useful for reducing KRAS target RNA and protein levels via use of Dicer substrate siRNA (DsiRNA) agents possessing asymmetric end structures.

### CROSS-REFERENCE TO RELATED APPLICATIONS

[0001] The present application is a Divisional of U.S. patent application Ser. No. 12/754,427, filed Apr. 5, 2010, which claims priority to, and the benefit under 35 U.S.C. § 119(e) of, the following applications: U.S. provisional patent application No. 61/166,559, filed Apr. 3, 2009; U.S. provisional patent application No. 61/166,578, filed Apr. 3, 2009; U.S. provisional patent application No. 61/174,279, filed Apr. 30, 2009; U.S. provisional patent application No. 61/174,306, filed Apr. 30, 2009; U.S. provisional patent application No. 61/257,810, filed Nov. 3, 2009; and U.S. provisional patent application No. 61/257,820, filed Nov. 3, 2009. U.S. Ser. No. 12/754,427 also claims priority to the following applications: U.S. patent application Ser. No. 12/704,256, filed Feb. 11, 2010; U.S. patent application Ser. No. 12/642,371, filed Dec. 18, 2009; U.S. patent application Ser. No. 12/646,404, filed Dec. 18, 2009; U.S. patent application Ser. No. 12/642,264, filed Dec. 18, 2009; and PCT application No. PCT/US2009/005214, filed Sep. 17, 2009. U.S. Ser. No. 12/704,256 claims priority to U.S. provisional application No. 61/151,841, filed Feb. 11, 2009. U.S. Ser. No. 12/754,427 also claims priority to, and the benefit under 35 U.S.C. § 119(e) of, the following applications: U.S. provisional patent application No. 61/183,815, filed Jun. 3, 2009; U.S. provisional patent application No. 61/183,818, filed Jun. 3, 2009; U.S. provisional patent application No. 61/184,735, filed Jun. 5, 2009; U.S. provisional patent application No. 61/285,925, filed Dec. 11, 2009; and U.S. provisional patent application No. 61/309,266, filed Mar. 1, 2010. The entire teachings of the above applications are incorporated herein by reference.

### FIELD OF THE INVENTION

[0002] The present invention relates to compounds, compositions, and methods for the study, diagnosis, and treatment of traits, diseases and conditions that respond to the modulation of KRAS gene expression and/or activity. The present invention is also directed to compounds, compositions, and methods relating to traits, diseases and conditions that respond to the modulation of expression and/or activity of genes involved in KRAS gene expression pathways or other cellular processes that mediate the maintenance or development of such traits, diseases and conditions. Specifically, the invention relates to small nucleic acid molecules that are capable of being processed by the Dicer enzyme, such as Dicer substrate siRNAs (DsiRNAs) capable of mediating RNA interference (RNAi) against KRAS gene expression. Such anti-KRAS DsiRNAs are useful, for example, in providing compositions for treatment of traits, diseases and conditions that can respond to modulation of KRAS in a subject, such as cancer and/or other proliferative diseases, disorders, or conditions.

### BACKGROUND OF THE INVENTION

[0003] Disregulated Ras signaling can lead to tumor growth and metastasis (Goodsell D S. Oncologist 4: 263-4). It is estimated that 20-25% of all human tumors contain activating mutations in Ras; and in specific tumor types, this figure can be as high as 90% (Downward J. Nat Rev Cancer, 3: 11-22). Accordingly, members of the Ras gene family are attractive molecular targets for cancer therapeutic design.

[0004] The three human RAS genes encode highly related 188 to 189 amino acid proteins, designated H-Ras, N-Ras and K-Ras4A (KRAS isoform a) and K-Ras4B (KRAS isoform b; the two KRas proteins arise from alternative gene splicing). Ras proteins function as binary molecular switches that control intracellular signaling networks. Ras-regulated signal pathways control such processes as actin cytoskeletal integrity, proliferation, differentiation, cell adhesion, apoptosis, and cell migration. Ras and Ras-related proteins are often deregulated in cancers, leading to increased invasion and metastasis, and decreased apoptosis. Ras activates a number of pathways but an especially important one for tumorigenesis appears to be the mitogen-activated protein (MAP) kinases, which themselves transmit signals downstream to other protein kinases and gene regulatory proteins (Lodish et al. Molecular Cell Biology (4th ed.). San Francisco: W.H. Freeman, Chapter 25, “Cancer”).

[0005] Double-stranded RNA (dsRNA) agents possessing strand lengths of 25 to 35 nucleotides have been described as effective inhibitors of target gene expression in mammalian cells (Rossi et al., U.S. Patent Application Nos. 2005/0244858 and U.S. 2005/0277610). dsRNA agents of such length are believed to be processed by the Dicer enzyme of the RNA interference (RNAi) pathway, leading such agents to be termed “Dicer substrate siRNA” (“DsiRNA”) agents. Additional modified structures of DsiRNA agents were previously described (Rossi et al., U.S. Patent Application No. 2007/0265220).

### BRIEF SUMMARY OF THE INVENTION

[0006] The present invention is directed to compositions that contain double stranded RNA (“dsRNA”), and methods for preparing them. The dsRNAs of the invention are capable of reducing the expression of a target KRas gene in a cell, either in vitro or in a mammalian subject. More particularly, the invention is directed to preferred Dicer substrate siRNAs (“DsiRNAs”) with structures and modification patterns that are optimized to act as effective and highly potent KRAS inhibitory agents, optionally possessing extended duration of inhibitory effect. A majority of such DsiRNAs possess target-specific inhibitory potencies and efficacies that are surprisingly enhanced relative to 21 nucleotide siRNAs directed against the same target RNA. While not intending to be bound by theory, such enhanced activity likely reflects an advantage inherent in DsiRNA agents engaging the RNAi pathway at a point in the pathway that is upstream of the point at which shorter siRNA agents engage the RNAi pathway.

[0007] In one aspect, the invention provides an isolated double stranded ribonucleic acid (dsRNA) comprising first and second nucleic acid strands and a duplex region of at least 25 base pairs, wherein the second strand of said dsRNA comprises 1-5 single-stranded nucleotides at its 3′ terminus, wherein the second oligonucleotide strand is sufficiently complementary to a target KRAS cDNA sequence selected from the group consisting of SEQ ID NOs: 141-186 along at least 19 nucleotides and at most 35 nucleotides of the second oligonucleotide strand length to reduce KRAS target gene expression when the double stranded nucleic acid is introduced into a mammalian cell.

[0008] In one embodiment, starting from the first nucleotide (position 1) at the 3′ terminus of the first oligonucleotide strand, position 1, 2 and/or 3 is substituted with a modified nucleotide. In certain embodiments, the modified nucleotide residue of the 3′ terminus of the first strand is a deoxyribonucleotide, an acyclonucleotide or a fluorescent molecule. In a related embodiment, position 1 of the 3′ terminus of the first oligonucleotide strand is a deoxyribonucleotide.

[0009] In an additional embodiment, the 3′ terminus of the first strand and the 5′ terminus of the second strand form a blunt end.

[0010] In another embodiment, the first strand is 25 nucleotides in length and the second strand is 27 nucleotides in length.

[0011] In one embodiment, the second strand includes a sequence of SEQ ID NOs: 11-50 and 135-140.

[0012] In another embodiment, the first strand includes a sequence of SEQ ID NOs: 5, 8 and 91-134.

[0013] In an additional embodiment, the dsRNA includes a pair of first strand/second strand sequences that is SEQ ID NO: 5/SEQ ID NO: 14, SEQ ID NO: 8/SEQ ID NO: 43, SEQ ID NO: 132/SEQ ID NO: 138, SEQ ID NO: 91/SEQ ID NO: 11, SEQ ID NO: 129/SEQ ID NO: 135, SEQ ID NO: 92/SEQ ID NO: 12, SEQ ID NO: 130/SEQ ID NO: 136, SEQ ID NO: 93/SEQ ID NO: 13, SEQ ID NO: 131/SEQ ID NO: 137, SEQ ID NO: 94/SEQ ID NO: 15, SEQ ID NO: 133/SEQ ID NO: 139, SEQ ID NO: 95/SEQ ID NO: 16, SEQ ID NO: 96/SEQ ID NO: 17, SEQ ID NO: 97/SEQ ID NO: 18, SEQ ID NO: 98/SEQ ID NO: 19, SEQ ID NO: 99/SEQ ID NO: 20, SEQ ID NO: 100/SEQ ID NO: 21, SEQ ID NO: 101/SEQ ID NO: 22, SEQ ID NO: 102/SEQ ID NO: 23, SEQ ID NO: 103/SEQ ID NO: 24, SEQ ID NO: 104/SEQ ID NO: 25, SEQ ID NO: 105/SEQ ID NO: 26, SEQ ID NO: 106/SEQ ID NO: 27, SEQ ID NO: 107/SEQ ID NO: 28, SEQ ID NO: 108/SEQ ID NO: 29, SEQ ID NO: 109/SEQ ID NO: 30, SEQ ID NO: 110/SEQ ID NO: 31, SEQ ID NO: 111/SEQ ID NO: 32, SEQ ID NO: 112/SEQ ID NO: 33, SEQ ID NO: 113/SEQ ID NO: 34, SEQ ID NO: 114/SEQ ID NO: 35, SEQ ID NO: 115/SEQ ID NO: 36, SEQ ID NO: 116/SEQ ID NO: 37, SEQ ID NO: 117/SEQ ID NO: 38, SEQ ID NO: 118/SEQ ID NO: 39, SEQ ID NO: 119/SEQ ID NO: 40, SEQ ID NO: 134/SEQ ID NO: 140, SEQ ID NO: 120/SEQ ID NO: 41, SEQ ID NO: 121/SEQ ID NO: 42, SEQ ID NO: 122/SEQ ID NO: 44, SEQ ID NO: 123/SEQ ID NO: 45, SEQ ID NO: 124/SEQ ID NO: 46, SEQ ID NO: 125/SEQ ID NO: 47, SEQ ID NO: 126/SEQ ID NO: 48, SEQ ID NO: 127/SEQ ID NO: 49 or SEQ ID NO: 128/SEQ ID NO: 50.

[0014] In one embodiment, each of the first and the second strands has a length which is at least 26 nucleotides.

[0015] In another embodiment, the nucleotides of the 3′ overhang include a modified nucleotide. Optionally, the modified nucleotide of the 3′ overhang is a 2′-O-methyl ribonucleotide. In a related embodiment, all nucleotides of the 3′ overhang are modified nucleotides.

[0016] In an additional embodiment, one or both of the first and second oligonucleotide strands includes a 5′ phosphate.

[0017] In another embodiment, the modified nucleotide residues of the dsRNA are 2′-O-methyl, 2′-methoxyethoxy, 2′-fluoro, 2′-allyl, 2′-O-[2-(methylamino)-2-oxoethyl], 4′-thio, 4′-CH2-O-2′-bridge, 4′-(CH2)₂—O-2′-bridge, 2′-LNA, 2′-amino or 2′-O—(N-methylcarbamate).

[0018] In one embodiment, the 3′ overhang of the dsRNA is 1-3 nucleotides in length. Optionally, the 3′ overhang is 1-2 nucleotides in length. In a related embodiment, the 3′ overhang is two nucleotides in length and the modified nucleotide of the 3′ overhang is a 2′-O-methyl modified ribonucleotide.

[0019] In a further embodiment, the second oligonucleotide strand, starting from the nucleotide residue of the second strand that is complementary to the 5′ terminal nucleotide residue of the first oligonucleotide strand, includes alternating modified and unmodified nucleotide residues. In another embodiment, the second oligonucleotide strand, starting from the nucleotide residue of the second strand that is complementary to the 5′ terminal nucleotide residue of the first oligonucleotide strand, includes unmodified nucleotide residues at all positions from position 18 to the 5′ terminus of the second oligonucleotide strand.

[0020] In another embodiment, each of the first and the second strands has a length which is at least 26 and at most 30 nucleotides.

[0021] In one embodiment, the dsRNA is cleaved endogenously in the cell by Dicer.

[0022] In an additional embodiment, the amount of the isolated double stranded nucleic acid sufficient to reduce expression of the target gene is 1 nanomolar or less, 200 picomolar or less, 100 picomolar or less, 50 picomolar or less, 20 picomolar or less, 10 picomolar or less, 5 picomolar or less, 2 picomolar or less or 1 picomolar or less in the environment of the cell.

[0023] In a further embodiment, the isolated dsRNA possesses greater potency than isolated 21mer siRNAs directed to the identical at least 19 nucleotides of the target KRAS cDNA in reducing target KRAS gene expression when assayed in vitro in a mammalian cell at an effective concentration in the environment of a cell of 1 nanomolar or less, 200 picomolar or less, 100 picomolar or less, 50 picomolar or less, 20 picomolar or less, 10 picomolar or less, 5 picomolar or less, 2 picomolar or less or 1 picomolar or less.

[0024] In another embodiment, the isolated dsRNA is sufficiently complementary to the target KRAS cDNA sequence to reduce KRAS target gene expression by at least 10%, at least 50%, at least 80-90%, at least 95%, at least 98%, or at least 99% when the double stranded nucleic acid is introduced into a mammalian cell.

[0025] In a further embodiment, the first and second strands are joined by a chemical linker. In a related embodiment, the 3′ terminus of the first strand and the 5′ terminus of the second strand are joined by a chemical linker.

[0026] In one embodiment, a nucleotide of the second or first strand is substituted with a modified nucleotide that directs the orientation of Dicer cleavage.

[0027] In another embodiment, the dsRNA has a modified nucleotide that is a deoxyribonucleotide, a dideoxyribonucleotide, an acyclonucleotide, a 3′-deoxyadenosine (cordycepin), a 3′-azido-3′-deoxythymidine (AZT), a 2′,3′-dideoxyinosine (ddI), a 2′,3′-dideoxy-3′-thiacytidine (3TC), a 2′,3′-didehydro-2′,3′-dideoxythymidine (d4T), a monophosphate nucleotide of 3′-azido-3′-deoxythymidine (AZT), a 2′,3′-dideoxy-3′-thiacytidine (3TC) and a monophosphate nucleotide of 2′,3′-didehydro-2′,3′-dideoxythymidine (d4T), a 4-thiouracil, a 5-bromouracil, a 5-iodouracil, a 5-(3-aminoallyl)-uracil, a 2′-O-alkyl ribonucleotide, a 2′-O-methyl ribonucleotide, a 2′-amino ribonucleotide, a 2′-fluoro ribonucleotide, or a locked nucleic acid.

[0028] In an additional embodiment, the dsRNA has a phosphonate, a phosphorothioate or a phosphotriesterphosphate backbone modification.

[0029] In one embodiment, the invention provides a method for reducing expression of a target KRAS gene in a mammalian cell having contacting a mammalian cell in vitro with an isolated dsRNA as described in an amount sufficient to reduce expression of a target KRAS gene in the cell.

[0030] In one embodiment, target KRAS gene expression is reduced by at least 10%, at least 50%, or at least 80-90%. In another embodiment, target KRAS mRNA levels are reduced at least 90% at least 8 days after the cell is contacted with the dsRNA. In a further embodiment, KRAS mRNA levels are reduced by at least 70% at least 10 days after the cell is contacted with the dsRNA.

[0031] In a further embodiment, the invention provides a method for reducing expression of a target KRAS gene in a mammal by administering an isolated dsRNA as described to a mammal in an amount sufficient to reduce expression of a target KRAS gene in the mammal.

[0032] In one embodiment, the isolated dsRNA is administered at a dosage of 1 microgram to 5 milligrams per kilogram of the mammal per day, 100 micrograms to 0.5 milligrams per kilogram, 0.001 to 0.25 milligrams per kilogram, 0.01 to 20 micrograms per kilogram, 0.01 to 10 micrograms per kilogram, 0.10 to 5 micrograms per kilogram, or 0.1 to 2.5 micrograms per kilogram.

[0033] In another embodiment, the isolated dsRNA possesses greater potency than isolated 21mer siRNAs directed to the identical at least 19 nucleotides of the target KRAS cDNA in reducing target KRAS gene expression when assayed in vitro in a mammalian cell at an effective concentration in the environment of a cell of 1 nanomolar or less.

[0034] In an additional embodiment, the administering step includes intravenous injection, intramuscular injection, intraperitoneal injection, infusion, subcutaneous injection, transdermal, aerosol, rectal, vaginal, topical, oral or inhaled delivery.

[0035] In a further embodiment, the invention provides a method for selectively inhibiting the growth of a cell by contacting a cell with an amount of an isolated dsRNA as described, in an amount sufficient to inhibit the growth of the cell.

[0036] In one embodiment, the cell is a tumor cell of a subject. Optionally, the cell is a tumor cell in vitro. In a related embodiment, the cell is a human cell.

[0037] In an additional embodiment, the invention provides a formulation which includes an isolated dsRNA as described, where the dsRNA is present in an amount effective to reduce target KRAS RNA levels when the dsRNA is introduced into a mammalian cell in vitro by at least 10%, at least 50% or at least 80-90%, and where the dsRNA possesses greater potency than isolated 21mer siRNAs directed to the identical at least 19 nucleotides of the target KRAS cDNA in reducing target KRAS RNA levels when assayed in vitro in a mammalian cell at an effective concentration in the environment of a cell of 1 nanomolar or less.

[0038] In one embodiment, the effective amount is 1 nanomolar or less, 200 picomolar or less, 100 picomolar or less, 50 picomolar or less, 20 picomolar or less, 10 picomolar or less, 5 picomolar or less, 2 picomolar or less or 1 picomolar or less in the environment of the cell.

[0039] In another embodiment, the invention provides a formulation which includes an isolated dsRNA as described, where the dsRNA is present in an amount effective to reduce target RNA levels when the dsRNA is introduced into a cell of a mammalian subject by at least 10%, at least 50% or at least 80-90%, and where the dsRNA possesses greater potency than isolated 21mer siRNAs directed to the identical at least 19 nucleotides of the target KRAS cDNA in reducing target KRAS RNA levels when assayed in vitro in a mammalian cell at an effective concentration in the environment of a cell of 1 nanomolar or less.

[0040] In one embodiment, the effective amount is a dosage of 1 microgram to 5 milligrams per kilogram of the subject per day, 100 micrograms to 0.5 milligrams per kilogram, 0.001 to 0.25 milligrams per kilogram, 0.01 to 20 micrograms per kilogram, 0.01 to 10 micrograms per kilogram, 0.10 to 5 micrograms per kilogram, or 0.1 to 2.5 micrograms per kilogram.

[0041] In an additional embodiment, the invention provides a mammalian cell containing an isolated dsRNA as described.

[0042] Another embodiment of the invention provides a pharmaceutical composition which includes an isolated dsRNA as described and a pharmaceutically acceptable carrier. A further embodiment of the invention provides a kit having an isolated dsRNA as described and instructions for its use.

[0043] In an additional aspect, the invention provides a composition possessing KRAS inhibitory activity consisting essentially of an isolated double stranded ribonucleic acid (dsRNA) comprising first and second nucleic acid strands and a duplex region of at least 25 base pairs, wherein the second strand of said dsRNA comprises 1-5 single-stranded nucleotides at its 3′ terminus, wherein the second oligonucleotide strand is sufficiently complementary to a target KRAS cDNA sequence selected from the group consisting of SEQ ID NOs: 141-186 along at least 19 nucleotides and at most 35 nucleotides of the second oligonucleotide strand length to reduce KRAS target gene expression when the double stranded nucleic acid is introduced into a mammalian cell.

[0044] In another aspect, the invention provides an isolated double stranded ribonucleic acid (dsRNA) comprising first and second nucleic acid strands and a duplex region of at least 25 base pairs, wherein the second strand of said dsRNA comprises 1-5 single-stranded nucleotides at its 3′ terminus, wherein the second oligonucleotide strand is sufficiently complementary to a target KRAS cDNA sequence selected from the group consisting of SEQ ID NOs: 1595-2297 and 3704-4406 along at least 19 nucleotides and at most 35 nucleotides of the second oligonucleotide strand length to reduce KRAS target gene expression when the double stranded nucleic acid is introduced into a mammalian cell.

[0045] In one embodiment, the second strand includes a sequence of SEQ ID NOs: 189-891 and 2298-3000.

[0046] In another embodiment, the first strand includes a sequence of SEQ ID NOs: 892-1594 and 3001-3703.

[0047] In an additional embodiment, the dsRNA includes a DsiRNA agent selected from the group consisting of DsiRNA agents shown in Tables 4-5.

[0048] In a further aspect, the invention provides a composition possessing KRAS inhibitory activity consisting essentially of an isolated double stranded ribonucleic acid (dsRNA) comprising first and second nucleic acid strands and a duplex region of at least 25 base pairs, wherein the second strand of the dsRNA comprises 1-5 single-stranded nucleotides at its 3′ terminus, wherein the second oligonucleotide strand is sufficiently complementary to a target KRAS cDNA sequence selected from the group consisting of SEQ ID NOs: 1595-2297 and 3704-4406 along at least 19 nucleotides and at most 35 nucleotides of the second oligonucleotide strand length to reduce KRAS target gene expression when the double stranded nucleic acid is introduced into a mammalian cell.

### BRIEF DESCRIPTION OF THE DRAWINGS

[0049] FIG. 1 shows the structures of exemplary DsiRNA agents targeting a site in the KRAS RNA referred to herein as the “KRAS-355” target site. The 25/27mer and 27/27mer DsiRNA agents (optionally, possessing a blunt/fray design) were tested for KRas inhibitory efficacy in comparison with the 21mer siRNA constructs shown. UPPER case=unmodified RNA, lower case=DNA, Bold=mismatch base pair nucleotides; arrowheads indicate projected Dicer enzyme cleavage sites; dashed line indicates sense strand (top strand) sequences corresponding to the projected Argonaute 2 (Ago2) cleavage site within the targeted KRas sequence.

[0050] FIG. 2 shows the anti-KRAS inhibitory efficacy of the agents depicted in FIG. 1, when transformed into cells in culture at 1 nanomolar concentration. “Optimized”=25/27mer DsiRNA and 21mer siRNA of FIG. 1; Blunt/Blunt and Blunt/Fray agents are as indicated in FIG. 1; “Veh”=vehicle-treated control; “Un”=untreated control.

[0051] FIG. 3 shows the anti-KRAS inhibitory efficacy of the agents depicted in FIG. 1, when transformed into cells in culture at 100 picomolar concentration. “Optimized”=25/27mer DsiRNA and 21mer siRNA of FIG. 1; Blunt/Blunt and Blunt/Fray agents are as indicated in FIG. 1; “Veh”=vehicle-treated control; “Un”=untreated control.

[0052] FIG. 4 shows the structures of exemplary DsiRNA agents targeting a site in the KRAS RNA referred to herein as the “KRAS-940” target site. The 25/27mer and 27/27mer DsiRNA agents (optionally, possessing a blunt/fray design) were tested for KRAS inhibitory efficacy in comparison with the 21mer siRNA constructs shown. UPPER case=unmodified RNA, lower case=DNA, Bold=mismatch base pair nucleotides; arrowheads indicate projected Dicer enzyme cleavage sites; dashed line indicates sense strand (top strand) sequences corresponding to the projected Argonaute 2 (Ago2) cleavage site within the targeted KRAS sequence.

[0053] FIG. 5 shows the anti-KRAS inhibitory efficacy of the agents depicted in FIG. 4, when transformed into cells in culture at 1 nanomolar concentration. “Optimized”=25/27mer DsiRNA and 21mer siRNA of FIG. 4; Blunt/Blunt and Blunt/Fray agents are as indicated in FIG. 4; “Veh”=vehicle-treated control; “Un”=untreated control.

[0054] FIG. 6 shows the anti-KRAS inhibitory efficacy of the agents depicted in FIG. 4, when transformed into cells in culture at 100 picomolar concentration. “Optimized”=25/27mer DsiRNA and 21mer siRNA of FIG. 4; Blunt/Blunt and Blunt/Fray agents are as indicated in FIG. 4; “Veh”=vehicle-treated control; “Un”=untreated control.

[0055] FIG. 7 shows a schematic comparison of tested DsiRNAs and their Dicer processing products, as compared to cognate 21mer siRNAs directed against the same exact KRAS target sequence. 2′-O-methyl modifications are indicated by open circles; shaded circles indicate deoxyribonucleotides; shaded triangles indicate Dicer enzyme cleavage sites within a 25/27mer agent; open triangles indicate the position on the antisense strand corresponding to the Argonaute 2 (Ago2) cleavage sites within the target RNA. Such sites are identical between the 40 tested DsiRNA agents when compared to their cognate siRNA agents.

[0056] FIG. 8 shows a plot of comparative inhibitory efficacies between anti-KRAS DsiRNA 25/27mers and their cognate 21mer siRNAs. The plot is arranged in rank-order by % inhibition of KRAS target gene by the 25/27mer DsiRNA agent. Arrows indicate the difference in efficacy observed between DsiRNA agent and corresponding siRNA agent. Squares indicate siRNA inhibitory results; circles indicate DsiRNA inhibitory results.

[0057] FIG. 9 shows a graph of inhibitory results arranged in rank-order by amount of difference in inhibitory effect between DsiRNA agents and their cognate siRNAs. Both DsiRNAs and siRNAs were tested at 24 hours post-administration at both 5 nM (shaded squares) and 1 nM (shaded triangles), and at 48 hours post administration at both 5 nM (open squares) and 1 nM (open triangles). Shaded regions indicate agents for which a statistically significant difference was observed between DsiRNA and cognate siRNA. For 26 of the 40 tested anti-KRAS DsiRNA agents, statistically significant DsiRNA superiority was observed, as compared to only six of forty siRNA agents that outperformed DsiRNA agents.

[0058] FIGS. 10 and 11 show IC-50 curves observed for indicated human KRAS-targeting DsiRNAs.

[0059] FIGS. 12-21 show histograms of human KRAS inhibitory efficacies observed for indicated DsiRNAs. “P1” indicates phase 1, while “P2” indicates phase 2. In phase 1, DsiRNAs were tested at 1 nM in the environment of HeLa cells. In phase 2, DsiRNAs were tested at 1 nM and at 0.1 nM (with duplicate experiments run at 0.1 nM) in the environment of HeLa cells. Individual bars represent average human KRAS levels observed in triplicate, with standard errors shown. Human KRAS levels were normalized to HPRT and SFRS9 levels.

[0060] FIGS. 22-31 show histograms of mouse KRAS inhibitory efficacies observed for indicated DsiRNAs. “P1” indicates phase 1, while “P2” indicates phase 2. In phase 1, DsiRNAs were tested at 1 nM in the environment of mouse Hepa 1-6 cells. In phase 2, DsiRNAs were tested at 1 nM and at 0.1 nM (with duplicate experiments run at 0.1 nM) in the environment of mouse Hepa 1-6 cells. Individual bars represent average mouse KRAS levels observed in triplicate, with standard errors shown. Mouse KRAS levels were normalized to HPRT and Rp123 levels.

### DETAILED DESCRIPTION OF THE INVENTION

[0061] The present invention is directed to compositions that contain double stranded RNA (“dsRNA”), and methods for preparing them, that are capable of reducing the level and/or expression of the KRAS gene in vivo or in vitro. One of the strands of the dsRNA contains a region of nucleotide sequence that has a length that ranges from 19 to 35 nucleotides that can direct the destruction and/or translational inhibition of the targeted KRAS transcript.

### Definitions

[0062] Unless defined otherwise, all technical and scientific terms used herein have the meaning commonly understood by a person skilled in the art to which this invention belongs. The following references provide one of skill with a general definition of many of the terms used in this invention: Singleton et al., Dictionary of Microbiology and Molecular Biology (2nd ed. 1994); The Cambridge Dictionary of Science and Technology (Walker ed., 1988); The Glossary of Genetics, 5th Ed., R. Rieger et al. (eds.), Springer Verlag (1991); and Hale & Marham, The Harper Collins Dictionary of Biology (1991). As used herein, the following terms have the meanings ascribed to them below, unless specified otherwise.

[0063] The present invention features one or more DsiRNA molecules that can modulate (e.g., inhibit) KRAS expression. The DsiRNAs of the invention optionally can be used in combination with modulators of other genes and/or gene products associated with the maintenance or development of diseases or disorders associated with KRAS misregulation (e.g., tumor formation and/or growth, etc.). The DsiRNA agents of the invention modulate KRAS RNAs such as those corresponding to the cDNA sequences referred to by GenBank Accession Nos. NM_033360 and NM_004985, which are recited below and referred to herein generally as “KRAS.”

[0064] The below description of the various aspects and embodiments of the invention is provided with reference to exemplary KRAS RNAs, generally referred to herein as KRAS. However, such reference is meant to be exemplary only and the various aspects and embodiments of the invention are also directed to alternate KRAS RNAs, such as mutant KRAS RNAs or additional KRAS splice variants. Certain aspects and embodiments are also directed to other genes involved in KRAS pathways, including genes whose misregulation acts in association with that of KRAS (or is affected or affects KRAS regulation) to produce phenotypic effects that may be targeted for treatment (e.g., tumor formation and/or growth, etc.). Such additional genes can be targeted using DsiRNA and the methods described herein for use of KRAS targeting DsiRNAs. Thus, the inhibition and the effects of such inhibition of the other genes can be performed as described herein.

[0065] The term “KRAS” refers to nucleic acid sequences encoding a KRas protein, peptide, or polypeptide (e.g., KRAS transcripts, such as the sequences of KRAS Genbank Accession Nos. NM_033360.2 and NM_004985.3). In certain embodiments, the term “KRAS” is also meant to include other KRAS encoding sequence, such as other KRAS isoforms, mutant KRAS genes, splice variants of KRAS genes, and KRAS gene polymorphisms. The term “Kras” is used to refer to the polypeptide gene product of a KRAS gene/transcript, e.g., a Kras protein, peptide, or polypeptide, such as those encoded by KRAS Genbank Accession Nos. NM_033360.2 and NM_004985.3.

[0066] As used herein, a “KRAS-associated disease or disorder” refers to a disease or disorder known in the art to be associated with altered KRAS expression, level and/or activity. Notably, a “KRAS-associated disease or disorder” includes cancer and/or proliferative diseases, conditions, or disorders.

[0067] By “proliferative disease” or “cancer” as used herein is meant, a disease, condition, trait, genotype or phenotype characterized by unregulated cell growth or replication as is known in the art; including leukemias, for example, acute myelogenous leukemia (AML), chronic myelogenous leukemia (CML), acute lymphocytic leukemia (ALL), and chronic lymphocytic leukemia, AIDS related cancers such as Kaposi's sarcoma; breast cancers; bone cancers such as Osteosarcoma, Chondrosarcomas, Ewing's sarcoma, Fibrosarcomas, Giant cell tumors, Adamantinomas, and Chordomas; Brain cancers such as Meningiomas, Glioblastomas, Lower-Grade Astrocytomas, Oligodendrocytomas, Pituitary Tumors, Schwannomas, and Metastatic brain cancers; cancers of the head and neck including various lymphomas such as mantle cell lymphoma, non-Hodgkins lymphoma, adenoma, squamous cell carcinoma, laryngeal carcinoma, gallbladder and bile duct cancers, cancers of the retina such as retinoblastoma, cancers of the esophagus, gastric cancers, multiple myeloma, ovarian cancer, uterine cancer, thyroid cancer, testicular cancer, endometrial cancer, melanoma, colorectal cancer, lung cancer, bladder cancer, prostate cancer, lung cancer (including non-small cell lung carcinoma), pancreatic cancer, sarcomas, Wilms' tumor, cervical cancer, head and neck cancer, skin cancers, nasopharyngeal carcinoma, liposarcoma, epithelial carcinoma, renal cell carcinoma, gallbladder adeno carcinoma, parotid adenocarcinoma, endometrial sarcoma, multidrug resistant cancers; and proliferative diseases and conditions, such as neovascularization associated with tumor angiogenesis, macular degeneration (e.g., wet/dry AMD), corneal neovascularization, diabetic retinopathy, neovascular glaucoma, myopic degeneration and other proliferative diseases and conditions such as restenosis and polycystic kidney disease, and other cancer or proliferative disease, condition, trait, genotype or phenotype that can respond to the modulation of disease related gene expression in a cell or tissue, alone or in combination with other therapies.

[0068] In certain embodiments, DsiRNA-mediated inhibition of a KRAS target sequence is assessed. In such embodiments, KRAS RNA levels can be assessed by art-recognized methods (e.g., RT-PCR, Northern blot, expression array, etc.), optionally via comparison of KRAS levels in the presence of an anti-KRAS DsiRNA of the invention relative to the absence of such an anti-KRAS DsiRNA. In certain embodiments, KRAS levels in the presence of an anti-KRAS DsiRNA are compared to those observed in the presence of vehicle alone, in the presence of a DsiRNA directed against an unrelated target RNA, or in the absence of any treatment. It is also recognized that levels of Kras protein can be assessed as indicative of KRAS RNA levels and/or the extent to which a DsiRNA inhibits KRAS expression, thus art-recognized methods of assessing KRAS protein levels (e.g., Western blot, immunoprecipitation, other antibody-based methods, etc.) can also be employed to examine the inhibitory effect of a DsiRNA of the invention. An anti-KRAS DsiRNA of the invention is deemed to possess “KRAS inhibitory activity” if a statistically significant reduction in KRAS RNA or protein levels is seen when an anti-KRAS DsiRNA of the invention is administered to a system (e.g., cell-free in vitro system), cell, tissue or organism, as compared to an appropriate control. The distribution of experimental values and the number of replicate assays performed will tend to dictate the parameters of what levels of reduction in KRAS RNA or protein (either as a % or in absolute terms) is deemed statistically significant (as assessed by standard methods of determining statistical significance known in the art). However, in certain embodiments, “KRAS inhibitory activity” is defined based upon a % or absolute level of reduction in the level of KRAS in a system, cell, tissue or organism. For example, in certain embodiments, a DsiRNA of the invention is deemed to possess KRAS inhibitory activity if at least a 5% reduction or at least a 10% reduction in KRAS RNA is observed in the presence of a DsiRNA of the invention relative to KRAS levels seen for a suitable control. (For example, in vivo KRAS levels in a tissue and/or subject can, in certain embodiments, be deemed to be inhibited by a DsiRNA agent of the invention if, e.g., a 5% or 10% reduction in KRAS levels is observed relative to a control.) In certain other embodiments, a DsiRNA of the invention is deemed to possess KRAS inhibitory activity if KRAS RNA levels are observed to be reduced by at least 15% relative to an appropriate control, by at least 20% relative to an appropriate control, by at least 25% relative to an appropriate control, by at least 30% relative to an appropriate control, by at least 35% relative to an appropriate control, by at least 40% relative to an appropriate control, by at least 45% relative to an appropriate control, by at least 50% relative to an appropriate control, by at least 55% relative to an appropriate control, by at least 60% relative to an appropriate control, by at least 65% relative to an appropriate control, by at least 70% relative to an appropriate control, by at least 75% relative to an appropriate control, by at least 80% relative to an appropriate control, by at least 85% relative to an appropriate control, by at least 90% relative to an appropriate control, by at least 95% relative to an appropriate control, by at least 96% relative to an appropriate control, by at least 97% relative to an appropriate control, by at least 98% relative to an appropriate control or by at least 99% relative to an appropriate control. In some embodiments, complete inhibition of KRAS is required for a DsiRNA to be deemed to possess KRAS inhibitory activity. In certain models (e.g., cell culture), a DsiRNA is deemed to possess KRAS inhibitory activity if at least a 50% reduction in KRAS levels is observed relative to a suitable control. In certain other embodiments, a DsiRNA is deemed to possess KRAS inhibitory activity if at least an 80% reduction in KRAS levels is observed relative to a suitable control.

[0069] KRAS inhibitory activity can also be evaluated over time (duration) and over concentration ranges (potency), with assessment of what constitutes a DsiRNA possessing KRAS inhibitory activity adjusted in accordance with concentrations administered and duration of time following administration. Thus, in certain embodiments, a DsiRNA of the invention is deemed to possess KRAS inhibitory activity if at least a 50% reduction in KRAS activity is observed at a duration of time of 2 hours, 5 hours, 10 hours, 1 day, 2 days, 3 days, 4 days, 5 days, 6 days, 7 days, 8 days, 9 days, 10 days or more after administration is observed/persists. In additional embodiments, a DsiRNA of the invention is deemed to be a potent KRAS inhibitory agent if KRAS inhibitory activity (e.g., in certain embodiments, at least 50% inhibition of KRAS) is observed at a concentration of 1 nM or less, 500 pM or less, 200 pM or less, 100 pM or less, 50 pM or less, 20 pM or less, 10 pM or less, 5 pM or less, 2 pM or less or even 1 pM or less in the environment of a cell.

[0070] In certain embodiments, the phrase “consists essentially of” is used in reference to the anti-KRAS DsiRNAs of the invention. In some such embodiments, “consists essentially of” refers to a composition that comprises a DsiRNA of the invention which possess at least a certain level of KRAS inhibitory activity (e.g., at least 50% KRAS inhibitory activity) and that also comprises one or more additional components and/or modifications that do not significantly impact the KRAS inhibitory activity of the DsiRNA. For example, in certain embodiments, a composition “consists essentially of” a DsiRNA of the invention where modifications of the DsiRNA of the invention and/or DsiRNA-associated components of the composition do not alter the KRAS inhibitory activity (optionally including potency or duration of KRAS inhibitory activity) by greater than 3%, greater than 5%, greater than 10%, greater than 15%, greater than 20%, greater than 25%, greater than 30%, greater than 35%, greater than 40%, greater than 45%, or greater than 50% relative to the DsiRNA of the invention in isolation. In certain embodiments, a composition is deemed to consist essentially of a DsiRNA of the invention even if more dramatic reduction of KRAS inhibitory activity (e.g., 80% reduction, 90% reduction, etc. in efficacy, duration and/or potency) occurs in the presence of additional components or modifications, yet where KRAS inhibitory activity is not significantly elevated (e.g., observed levels of KRAS inhibitory activity are within 10% those observed for the isolated DsiRNA of the invention) in the presence of additional components and/or modifications.

[0071] As used herein, the term “nucleic acid” refers to deoxyribonucleotides, ribonucleotides, or modified nucleotides, and polymers thereof in single- or double-stranded form. The term encompasses nucleic acids containing known nucleotide analogs or modified backbone residues or linkages, which are synthetic, naturally occurring, and non-naturally occurring, which have similar binding properties as the reference nucleic acid, and which are metabolized in a manner similar to the reference nucleotides. Examples of such analogs include, without limitation, phosphorothioates, phosphoramidates, methyl phosphonates, chiral-methyl phosphonates, 2-O-methyl ribonucleotides, peptide-nucleic acids (PNAs).

[0072] As used herein, “nucleotide” is used as recognized in the art to include those with natural bases (standard), and modified bases well known in the art. Such bases are generally located at the 1′ position of a nucleotide sugar moiety. Nucleotides generally comprise a base, sugar and a phosphate group. The nucleotides can be unmodified or modified at the sugar, phosphate and/or base moiety, (also referred to interchangeably as nucleotide analogs, modified nucleotides, non-natural nucleotides, non-standard nucleotides and other; see, e.g., Usman and McSwiggen, supra; Eckstein, et al., International PCT Publication No. WO 92/07065; Usman et al, International PCT Publication No. WO 93/15187; Uhlman & Peyman, supra, all are hereby incorporated by reference herein). There are several examples of modified nucleic acid bases known in the art as summarized by Limbach, et al, Nucleic Acids Res. 22:2183, 1994. Some of the non-limiting examples of base modifications that can be introduced into nucleic acid molecules include, hypoxanthine, purine, pyridin-4-one, pyridin-2-one, phenyl, pseudouracil, 2,4,6-trimethoxy benzene, 3-methyl uracil, dihydrouridine, naphthyl, aminophenyl, 5-alkylcytidines (e.g., 5-methylcytidine), 5-alkyluridines (e.g., ribothymidine), 5-halouridine (e.g., 5-bromouridine) or 6-azapyrimidines or 6-alkylpyrimidines (e.g. 6-methyluridine), propyne, and others (Burgin, et al., Biochemistry 35:14090, 1996; Uhlman & Peyman, supra). By “modified bases” in this aspect is meant nucleotide bases other than adenine, guanine, cytosine and uracil at 1′ position or their equivalents.

[0073] As used herein, “modified nucleotide” refers to a nucleotide that has one or more modifications to the nucleoside, the nucleobase, pentose ring, or phosphate group. For example, modified nucleotides exclude ribonucleotides containing adenosine monophosphate, guanosine monophosphate, uridine monophosphate, and cytidine monophosphate and deoxyribonucleotides containing deoxyadenosine monophosphate, deoxyguanosine monophosphate, deoxythymidine monophosphate, and deoxycytidine monophosphate. Modifications include those naturally occurring that result from modification by enzymes that modify nucleotides, such as methyltransferases. Modified nucleotides also include synthetic or non-naturally occurring nucleotides. Synthetic or non-naturally occurring modifications in nucleotides include those with 2′ modifications, e.g., 2′-methoxyethoxy, 2′-fluoro, 2′-allyl, 2′-O[2-(methylamino)-2-oxoethyl], 4′-thio, 4′-CH₂—O-2′-bridge, 4′—(CH₂)₂—O-2′-bridge, 2′-LNA, and 2′-O—(N-methylcarbamate) or those comprising base analogs. In connection with 2′-modified nucleotides as described for the present disclosure, by “amino” is meant 2′—NH₂ or 2′—O—NH₂, which can be modified or unmodified. Such modified groups are described, e.g., in Eckstein et al., U.S. Pat. No. 5,672,695 and Matulic-Adamic et al., U.S. Pat. No. 6,248,878.

[0074] In reference to the nucleic acid molecules of the present disclosure, modifications may exist upon these agents in patterns on one or both strands of the double stranded ribonucleic acid (dsRNA). As used herein, “alternating positions” refers to a pattern where every other nucleotide is a modified nucleotide or there is an unmodified nucleotide (e.g., an unmodified ribonucleotide) between every modified nucleotide over a defined length of a strand of the dsRNA (e.g., 5′-MNMNMN-3′; 3′-MNMNMN-5′; where M is a modified nucleotide and N is an unmodified nucleotide). The modification pattern starts from the first nucleotide position at either the 5′ or 3′ terminus according to a position numbering convention, e.g., as described herein (in certain embodiments, position 1 is designated in reference to the terminal residue of a strand following a projected Dicer cleavage event of a DsiRNA agent of the invention; thus, position 1 does not always constitute a 3′ terminal or 5′ terminal residue of a pre-processed agent of the invention). The pattern of modified nucleotides at alternating positions may run the full length of the strand, but in certain embodiments includes at least 4, 6, 8, 10, 12, 14 nucleotides containing at least 2, 3, 4, 5, 6 or 7 modified nucleotides, respectively. As used herein, “alternating pairs of positions” refers to a pattern where two consecutive modified nucleotides are separated by two consecutive unmodified nucleotides over a defined length of a strand of the dsRNA (e.g., 5′-MMNNMMNNMMNN-3′; 3′-MMNNMMNNMMNN-5′; where M is a modified nucleotide and N is an unmodified nucleotide). The modification pattern starts from the first nucleotide position at either the 5′ or 3′ terminus according to a position numbering convention such as those described herein. The pattern of modified nucleotides at alternating positions may run the full length of the strand, but preferably includes at least 8, 12, 16, 20, 24, 28 nucleotides containing at least 4, 6, 8, 10, 12 or 14 modified nucleotides, respectively. It is emphasized that the above modification patterns are exemplary and are not intended as limitations on the scope of the invention.

[0075] As used herein, “base analog” refers to a heterocyclic moiety which is located at the 1′ position of a nucleotide sugar moiety in a modified nucleotide that can be incorporated into a nucleic acid duplex (or the equivalent position in a nucleotide sugar moiety substitution that can be incorporated into a nucleic acid duplex). In the dsRNAs of the invention, a base analog is generally either a purine or pyrimidine base excluding the common bases guanine (G), cytosine (C), adenine (A), thymine (T), and uracil (U). Base analogs can duplex with other bases or base analogs in dsRNAs. Base analogs include those useful in the compounds and methods of the invention, e.g., those disclosed in U.S. Pat. Nos. 5,432,272 and 6,001,983 to Benner and US Patent Publication No. 20080213891 to Manoharan, which are herein incorporated by reference. Non-limiting examples of bases include hypoxanthine (I), xanthine (X), 3β-D-ribofuranosyl-(2,6-diaminopyrimidine) (K), 3-β-D-ribofuranosyl-(1-methyl-pyrazolo[4,3-d]pyrimidine-5,7(4H,6H)-dione) (P), iso-cytosine (iso-C), iso-guanine (iso-G), 1-β-D-ribofuranosyl-(5-nitroindole), 1-β-D-ribofuranosyl-(3-nitropyrrole), 5-bromouracil, 2-aminopurine, 4-thio-dT, 7-(2-thienyl)-imidazo[4,5-b]pyridine (Ds) and pyrrole-2-carbaldehyde (Pa), 2-amino-6-(2-thienyl)purine (S), 2-oxopyridine (Y), difluorotolyl, 4-fluoro-6-methylbenzimidazole, 4-methylbenzimidazole, 3-methyl isocarbostyrilyl, 5-methyl isocarbostyrilyl, and 3-methyl-7-propynyl isocarbostyrilyl, 7-azaindolyl, 6-methyl-7-azaindolyl, imidizopyridinyl, 9-methyl-imidizopyridinyl, pyrrolopyrizinyl, isocarbostyrilyl, 7-propynyl isocarbostyrilyl, propynyl-7-azaindolyl, 2,4,5-trimethylphenyl, 4-methylindolyl, 4,6-dimethylindolyl, phenyl, napthalenyl, anthracenyl, phenanthracenyl, pyrenyl, stilbenzyl, tetracenyl, pentacenyl, and structural derivates thereof (Schweitzer et al., J. Org. Chem., 59:7238-7242 (1994); Berger et al., Nucleic Acids Research, 28(15):2911-2914 (2000); Moran et al., J. Am. Chem. Soc., 119:2056-2057 (1997); Morales et al., J. Am. Chem. Soc., 121:2323-2324 (1999); Guckian et al., J. Am. Chem. Soc., 118:8182-8183 (1996); Morales et al., J. Am. Chem. Soc., 122(6):1001-1007 (2000); McMinn et al., J. Am. Chem. Soc., 121:11585-11586 (1999); Guckian et al., J. Org. Chem., 63:9652-9656 (1998); Moran et al., Proc. Natl. Acad. Sci., 94:10506-10511 (1997); Das et al., J. Chem. Soc., Perkin Trans., 1:197-206 (2002); Shibata et al., J. Chem. Soc., Perkin Trans., 1: 1605-1611 (2001); Wu et al., J. Am. Chem. Soc., 122(32):7621-7632 (2000); O'Neill et al., J. Org. Chem., 67:5869-5875 (2002); Chaudhuri et al., J. Am. Chem. Soc., 117:10434-10442 (1995); and U.S. Pat. No. 6,218,108). Base analogs may also be a universal base.

[0076] As used herein, “universal base” refers to a heterocyclic moiety located at the 1′ position of a nucleotide sugar moiety in a modified nucleotide, or the equivalent position in a nucleotide sugar moiety substitution, that, when present in a nucleic acid duplex, can be positioned opposite more than one type of base without altering the double helical structure (e.g., the structure of the phosphate backbone). Additionally, the universal base does not destroy the ability of the single stranded nucleic acid in which it resides to duplex to a target nucleic acid. The ability of a single stranded nucleic acid containing a universal base to duplex a target nucleic can be assayed by methods apparent to one in the art (e.g., UV absorbance, circular dichroism, gel shift, single stranded nuclease sensitivity, etc.). Additionally, conditions under which duplex formation is observed may be varied to determine duplex stability or formation, e.g., temperature, as melting temperature (Tm) correlates with the stability of nucleic acid duplexes. Compared to a reference single stranded nucleic acid that is exactly complementary to a target nucleic acid, the single stranded nucleic acid containing a universal base forms a duplex with the target nucleic acid that has a lower Tm than a duplex formed with the complementary nucleic acid. However, compared to a reference single stranded nucleic acid in which the universal base has been replaced with a base to generate a single mismatch, the single stranded nucleic acid containing the universal base forms a duplex with the target nucleic acid that has a higher Tm than a duplex formed with the nucleic acid having the mismatched base.

[0077] Some universal bases are capable of base pairing by forming hydrogen bonds between the universal base and all of the bases guanine (G), cytosine (C), adenine (A), thymine (T), and uracil (U) under base pair forming conditions. A universal base is not a base that forms a base pair with only one single complementary base. In a duplex, a universal base may form no hydrogen bonds, one hydrogen bond, or more than one hydrogen bond with each of G, C, A, T, and U opposite to it on the opposite strand of a duplex. Preferably, the universal bases does not interact with the base opposite to it on the opposite strand of a duplex. In a duplex, base pairing between a universal base occurs without altering the double helical structure of the phosphate backbone. A universal base may also interact with bases in adjacent nucleotides on the same nucleic acid strand by stacking interactions. Such stacking interactions stabilize the duplex, especially in situations where the universal base does not form any hydrogen bonds with the base positioned opposite to it on the opposite strand of the duplex. Non-limiting examples of universal-binding nucleotides include inosine, 1-β-D-ribofuranosyl-5-nitroindole, and/or 1-β-D-ribofuranosyl-3-nitropyrrole (US Pat. Appl. Publ. No. 20070254362 to Quay et al.; Van Aerschot et al., An acyclic 5-nitroindazole nucleoside analogue as ambiguous nucleoside. Nucleic Acids Res. 1995 Nov. 11; 23(21):4363-70; Loakes et al., 3-Nitropyrrole and 5-nitroindole as universal bases in primers for DNA sequencing and PCR. Nucleic Acids Res. 1995 Jul. 11; 23(13):2361-6; Loakes and Brown, 5-Nitroindole as an universal base analogue. Nucleic Acids Res. 1994 Oct. 11; 22(20):4039-43).

[0078] As used herein, “loop” refers to a structure formed by a single strand of a nucleic acid, in which complementary regions that flank a particular single stranded nucleotide region hybridize in a way that the single stranded nucleotide region between the complementary regions is excluded from duplex formation or Watson-Crick base pairing. A loop is a single stranded nucleotide region of any length. Examples of loops include the unpaired nucleotides present in such structures as hairpins, stem loops, or extended loops.

[0079] As used herein, “extended loop” in the context of a dsRNA refers to a single stranded loop and in addition 1, 2, 3, 4, 5, 6 or up to 20 base pairs or duplexes flanking the loop. In an extended loop, nucleotides that flank the loop on the 5′ side form a duplex with nucleotides that flank the loop on the 3′ side. An extended loop may form a hairpin or stem loop.

[0080] As used herein, “tetraloop” in the context of a dsRNA refers to a loop (a single stranded region) consisting of four nucleotides that forms a stable secondary structure that contributes to the stability of an adjacent Watson-Crick hybridized nucleotides. Without being limited to theory, a tetraloop may stabilize an adjacent Watson-Crick base pair by stacking interactions. In addition, interactions among the four nucleotides in a tetraloop include but are not limited to non-Watson-Crick base pairing, stacking interactions, hydrogen bonding, and contact interactions (Cheong et al., Nature 1990 Aug. 16; 346(6285):680-2; Heus and Pardi, Science 1991 Jul. 12; 253(5016):191-4). A tetraloop confers an increase in the melting temperature (Tm) of an adjacent duplex that is higher than expected from a simple model loop sequence consisting of four random bases. For example, a tetraloop can confer a melting temperature of at least 55° C. in 10 mM NaHPO₄ to a hairpin comprising a duplex of at least 2 base pairs in length. A tetraloop may contain ribonucleotides, deoxyribonucleotides, modified nucleotides, and combinations thereof. Examples of RNA tetraloops include the UNCG family of tetraloops (e.g., UUCG), the GNRA family of tetraloops (e.g., GAAA), and the CUUG tetraloop. (Woese et al., Proc Natl Acad Sci USA. 1990 November; 87(21):8467-71; Antao et al., Nucleic Acids Res. 1991 Nov. 11; 19(21):5901-5). Examples of DNA tetraloops include the d(GNNA) family of tetraloops (e.g., d(GTTA), the d(GNRA)) family of tetraloops, the d(GNAB) family of tetraloops, the d(CNNG) family of tetraloops, the d(TNCG) family of tetraloops (e.g., d(TTCG)). (Nakano et al. Biochemistry, 41 (48), 14281-14292, 2002; SHINJI et al. Nippon Kagakkai Koen Yokoshu VOL. 78th; NO. 2; PAGE. 731 (2000).)

[0081] As used herein, the term “siRNA” refers to a double stranded nucleic acid in which each strand comprises RNA, RNA analog(s) or RNA and DNA. The siRNA comprises between 19 and 23 nucleotides or comprises 21 nucleotides. The siRNA typically has 2 bp overhangs on the 3′ ends of each strand such that the duplex region in the siRNA comprises 17-21 nucleotides, or 19 nucleotides. Typically, the antisense strand of the siRNA is sufficiently complementary with the target sequence of the KRAS gene/RNA.

[0082] An anti-KRAS DsiRNA of the instant invention possesses strand lengths of at least 25 nucleotides. Accordingly, an anti-KRAS DsiRNA contains one oligonucleotide sequence, a first sequence, that is at least 25 nucleotides in length and no longer than 35 or up to 50 nucleotides. This sequence of RNA can be between 26 and 35, 26 and 34, 26 and 33, 26 and 32, 26 and 31, 26 and 30, and 26 and 29 nucleotides in length. This sequence can be 27 or 28 nucleotides in length or 27 nucleotides in length. The second sequence of the DsiRNA agent can be a sequence that anneals to the first sequence under biological conditions, such as within the cytoplasm of a eukaryotic cell. Generally, the second oligonucleotide sequence will have at least 19 complementary base pairs with the first oligonucleotide sequence, more typically the second oligonucleotide sequence will have 21 or more complementary base pairs, or 25 or more complementary base pairs with the first oligonucleotide sequence. In one embodiment, the second sequence is the same length as the first sequence, and the DsiRNA agent is blunt ended. In another embodiment, the ends of the DsiRNA agent have one or more overhangs.

[0083] In certain embodiments, the first and second oligonucleotide sequences of the DsiRNA agent exist on separate oligonucleotide strands that can be and typically are chemically synthesized. In some embodiments, both strands are between 26 and 35 nucleotides in length. In other embodiments, both strands are between 25 and 30 or 26 and 30 nucleotides in length. In one embodiment, both strands are 27 nucleotides in length, are completely complementary and have blunt ends. In certain embodiments of the instant invention, the first and second sequences of an anti-KRAS DsiRNA exist on separate RNA oligonucleotides (strands). In one embodiment, one or both oligonucleotide strands are capable of serving as a substrate for Dicer. In other embodiments, at least one modification is present that promotes Dicer to bind to the double-stranded RNA structure in an orientation that maximizes the double-stranded RNA structure's effectiveness in inhibiting gene expression. In certain embodiments of the instant invention, the anti-KRAS DsiRNA agent is comprised of two oligonucleotide strands of differing lengths, with the anti-KRAS DsiRNA possessing a blunt end at the 3′ terminus of a first strand (sense strand) and a 3′ overhang at the 3′ terminus of a second strand (antisense strand). The DsiRNA can also contain one or more deoxyribonucleic acid (DNA) base substitutions.

[0084] Suitable DsiRNA compositions that contain two separate oligonucleotides can be chemically linked outside their annealing region by chemical linking groups. Many suitable chemical linking groups are known in the art and can be used. Suitable groups will not block Dicer activity on the DsiRNA and will not interfere with the directed destruction of the RNA transcribed from the target gene. Alternatively, the two separate oligonucleotides can be linked by a third oligonucleotide such that a hairpin structure is produced upon annealing of the two oligonucleotides making up the DsiRNA composition. The hairpin structure will not block Dicer activity on the DsiRNA and will not interfere with the directed destruction of the target RNA.

[0085] As used herein, a dsRNA, e.g., DsiRNA or siRNA, having a sequence “sufficiently complementary” to a target RNA or cDNA sequence (e.g., KRAS mRNA) means that the dsRNA has a sequence sufficient to trigger the destruction of the target RNA (where a cDNA sequence is recited, the RNA sequence corresponding to the recited cDNA sequence) by the RNAi machinery (e.g., the RISC complex) or process. The dsRNA molecule can be designed such that every residue of the antisense strand is complementary to a residue in the target molecule. Alternatively, substitutions can be made within the molecule to increase stability and/or enhance processing activity of said molecule. Substitutions can be made within the strand or can be made to residues at the ends of the strand. In certain embodiments, substitutions and/or modifications are made at specific residues within a DsiRNA agent. Such substitutions and/or modifications can include, e.g., deoxy-modifications at one or more residues of positions 1, 2 and 3 when numbering from the 3′ terminal position of the sense strand of a DsiRNA agent; and introduction of 2′-O-alkyl (e.g., 2′-O-methyl) modifications at the 3′ terminal residue of the antisense strand of DsiRNA agents, with such modifications also being performed at overhang positions of the 3′ portion of the antisense strand and at alternating residues of the antisense strand of the DsiRNA that are included within the region of a DsiRNA agent that is processed to form an active siRNA agent. The preceding modifications are offered as exemplary, and are not intended to be limiting in any manner. Further consideration of the structure of preferred DsiRNA agents, including further description of the modifications and substitutions that can be performed upon the anti-KRAS DsiRNA agents of the instant invention, can be found below.

[0086] The phrase “duplex region” refers to the region in two complementary or substantially complementary oligonucleotides that form base pairs with one another, either by Watson-Crick base pairing or other manner that allows for a duplex between oligonucleotide strands that are complementary or substantially complementary. For example, an oligonucleotide strand having 21 nucleotide units can base pair with another oligonucleotide of 21 nucleotide units, yet only 19 bases on each strand are complementary or substantially complementary, such that the “duplex region” consists of 19 base pairs. The remaining base pairs may, for example, exist as 5′ and 3′ overhangs. Further, within the duplex region, 100% complementarity is not required; substantial complementarity is allowable within a duplex region. Substantial complementarity refers to complementarity between the strands such that they are capable of annealing under biological conditions. Techniques to empirically determine if two strands are capable of annealing under biological conditions are well know in the art. Alternatively, two strands can be synthesized and added together under biological conditions to determine if they anneal to one another.

[0087] Single-stranded nucleic acids that base pair over a number of bases are said to “hybridize.” Hybridization is typically determined under physiological or biologically relevant conditions (e.g., intracellular: pH 7.2, 140 mM potassium ion; extracellular pH 7.4, 145 mM sodium ion). Hybridization conditions generally contain a monovalent cation and biologically acceptable buffer and may or may not contain a divalent cation, complex anions, e.g. gluconate from potassium gluconate, uncharged species such as sucrose, and inert polymers to reduce the activity of water in the sample, e.g. PEG. Such conditions include conditions under which base pairs can form.

[0088] Hybridization is measured by the temperature required to dissociate single stranded nucleic acids forming a duplex, i.e., (the melting temperature; Tm). Hybridization conditions are also conditions under which base pairs can form. Various conditions of stringency can be used to determine hybridization (see, e.g., Wahl, G. M. and S. L. Berger (1987) Methods Enzymol. 152:399; Kimmel, A. R. (1987) Methods Enzymol. 152:507). Stringent temperature conditions will ordinarily include temperatures of at least about 30° C., more preferably of at least about 37° C., and most preferably of at least about 42° C. The hybridization temperature for hybrids anticipated to be less than 50 base pairs in length should be 5-10° C. less than the melting temperature (Tm) of the hybrid, where Tm is determined according to the following equations. For hybrids less than 18 base pairs in length, Tm(° C.)=2(# of A+T bases)+4(# of G+C bases). For hybrids between 18 and 49 base pairs in length, Tm(° C.)=81.5+16.6(log 10[Na+])+0.41 (% G+C)−(600/N), where N is the number of bases in the hybrid, and [Na+] is the concentration of sodium ions in the hybridization buffer ([Na+] for 1×SSC=0.165 M). For example, a hybridization determination buffer is shown in Table 1.

TABLE 1

| | | | | | | | To make | |
|---|---|---|---|---|---|---|---|---|
| | | | | | | | 50 mL | |
| | final conc. | | Vender | Cat# | Lot# | m.w./Stock | solution | |
| NaCl | 100 | mM | Sigma | S-5150 | 41K8934 | 5M | 1 | mL |
| KCl | 80 | mM | Sigma | P-9541 | 70K0002 | 74.55 | 0.298 | g |
| MgCl₂ | 8 | mM | Sigma | M-1028 | 120K8933 | 1M | 0.4 | mL |
| sucrose | 2% | w/v | Fisher | BP220-212 | 907105 | 342.3 | 1 | g |
| Tris-HCl | 16 | mM | Fisher | BP1757-500 | 12419 | 1M | 0.8 | mL |
| NaH₂PO₄ | 1 | mM | Sigma | S-3193 | 52H-029515 | 120.0 | 0.006 | g |
| EDTA | 0.02 | mM | Sigma | E-7889 | 110K89271 | 0.5M | 2 | μL |

| | | | | | |
|---|---|---|---|---|---|
| H₂O | Sigma | W-4502 | 51K2359 | to 50 | mL |

| | |
|---|---|
| pH = 7.0 | adjust with HCl |
| at 20° C. | |

[0089] Useful variations on hybridization conditions will be readily apparent to those skilled in the art. Hybridization techniques are well known to those skilled in the art and are described, for example, in Benton and Davis (Science 196:180, 1977); Grunstein and Hogness (Proc. Natl. Acad. Sci., USA 72:3961, 1975); Ausubel et al. (Current Protocols in Molecular Biology, Wiley Interscience, New York, 2001); Berger and Kimmel (Antisense to Molecular Cloning Techniques, 1987, Academic Press, New York); and Sambrook et al., Molecular Cloning: A Laboratory Manual, Cold Spring Harbor Laboratory Press, New York.

[0090] As used herein, “oligonucleotide strand” is a single stranded nucleic acid molecule. An oligonucleotide may comprise ribonucleotides, deoxyribonucleotides, modified nucleotides (e.g., nucleotides with 2′ modifications, synthetic base analogs, etc.) or combinations thereof. Such modified oligonucleotides can be preferred over native forms because of properties such as, for example, enhanced cellular uptake and increased stability in the presence of nucleases.

[0091] As used herein, the term “ribonucleotide” encompasses natural and synthetic, unmodified and modified ribonucleotides. Modifications include changes to the sugar moiety, to the base moiety and/or to the linkages between ribonucleotides in the oligonucleotide. As used herein, the term “ribonucleotide” specifically excludes a deoxyribonucleotide, which is a nucleotide possessing a single proton group at the 2′ ribose ring position.

[0092] As used herein, the term “deoxyribonucleotide” encompasses natural and synthetic, unmodified and modified deoxyribonucleotides. Modifications include changes to the sugar moiety, to the base moiety and/or to the linkages between deoxyribonucleotide in the oligonucleotide. As used herein, the term “deoxyribonucleotide” also includes a modified ribonucleotide that does not permit Dicer cleavage of a dsRNA agent, e.g., a 2′-O-methyl ribonucleotide, a phosphorothioate-modified ribonucleotide residue, etc., that does not permit Dicer cleavage to occur at a bond of such a residue.

[0093] As used herein, the term “PS-NA” refers to a phosphorothioate-modified nucleotide residue. The term “PS-NA” therefore encompasses both phosphorothioate-modified ribonucleotides (“PS-RNAs”) and phosphorothioate-modified deoxyribonucleotides (“PS-DNAs”).

[0094] As used herein, “Dicer” refers to an endoribonuclease in the RNase III family that cleaves a dsRNA or dsRNA-containing molecule, e.g., double-stranded RNA (dsRNA) or pre-microRNA (miRNA), into double-stranded nucleic acid fragments 19-25 nucleotides long, usually with a two-base overhang on the 3′ end. With respect to the dsRNAs of the invention, the duplex formed by a dsRNA region of an agent of the invention is recognized by Dicer and is a Dicer substrate on at least one strand of the duplex. Dicer catalyzes the first step in the RNA interference pathway, which consequently results in the degradation of a target RNA. The protein sequence of human Dicer is provided at the NCBI database under accession number NP_085124, hereby incorporated by reference.

[0095] Dicer “cleavage” is determined as follows (e.g., see Collingwood et al., Oligonucleotides 18:187-200 (2008)). In a Dicer cleavage assay, RNA duplexes (100 pmol) are incubated in 20 μL of 20 mM Tris pH 8.0, 200 mM NaCl, 2.5 mM MgCl2 with or without 1 unit of recombinant human Dicer (Stratagene, La Jolla, Calif.) at 37° C. for 18-24 hours. Samples are desalted using a Performa SR 96-well plate (Edge Biosystems, Gaithersburg, Md.). Electrospray-ionization liquid chromatography mass spectroscopy (ESI-LCMS) of duplex RNAs pre- and post-treatment with Dicer is done using an Oligo HTCS system (Novatia, Princeton, N.J.; Hail et al., 2004), which consists of a ThermoFinnigan TSQ7000, Xcalibur data system, ProMass data processing software and Paradigm MS4 HPLC (Michrom BioResources, Auburn, Calif.). In this assay, Dicer cleavage occurs where at least 5%, 10%, 20%, 30%, 40%, 50%, 60%, 70%, 80%, 90%, 95%, or even 100% of the Dicer substrate dsRNA, (i.e., 25-30 bp, dsRNA, preferably 26-30 bp dsRNA) is cleaved to a shorter dsRNA (e.g., 19-23 bp dsRNA, preferably, 21-23 bp dsRNA).

[0096] As used herein, “Dicer cleavage site” refers to the sites at which Dicer cleaves a dsRNA (e.g., the dsRNA region of a DsiRNA agent of the invention). Dicer contains two RNase III domains which typically cleave both the sense and antisense strands of a dsRNA. The average distance between the RNase III domains and the PAZ domain determines the length of the short double-stranded nucleic acid fragments it produces and this distance can vary (Macrae I, et al. (2006). “Structural basis for double-stranded RNA processing by Dicer”. Science 311 (5758): 195-8). As shown in FIGS. 1 and 4, Dicer is projected to cleave certain double-stranded ribonucleic acids of the instant invention that possess an antisense strand having a 2 nucleotide 3′ overhang at a site between the 21^{st} and 22^{nd} nucleotides removed from the 3′ terminus of the antisense strand, and at a corresponding site between the 21^{st} and 22^{nd} nucleotides removed from the 5′ terminus of the sense strand. The projected and/or prevalent Dicer cleavage site(s) for dsRNA molecules distinct from those depicted in FIGS. 1 and 4 may be similarly identified via art-recognized methods, including those described in Macrae et al. While the Dicer cleavage events depicted in FIGS. 1 and 4 generate 21 nucleotide siRNAs, it is noted that Dicer cleavage of a dsRNA (e.g., DsiRNA) can result in generation of Dicer-processed siRNA lengths of 19 to 23 nucleotides in length. Indeed, in certain embodiments, a double-stranded DNA region may be included within a dsRNA for purpose of directing prevalent Dicer excision of a typically non-preferred 19mer or 20mer siRNA, rather than a 21mer.

[0097] As used herein, “overhang” refers to unpaired nucleotides, in the context of a duplex having one or more free ends at the 5′ terminus or 3′ terminus of a dsRNA. In certain embodiments, the overhang is a 3′ or 5′ overhang on the antisense strand or sense strand. In some embodiments, the overhang is a 3′ overhang having a length of between one and six nucleotides, optionally one to five, one to four, one to three, one to two, two to six, two to five, two to four, two to three, three to six, three to five, three to four, four to six, four to five, five to six nucleotides, or one, two, three, four, five or six nucleotides.

[0098] As used herein, the term “RNA processing” refers to processing activities performed by components of the siRNA, miRNA or RNase H pathways (e.g., Drosha, Dicer, Argonaute2 or other RISC endoribonucleases, and RNaseH), which are described in greater detail below (see “RNA Processing” section below). The term is explicitly distinguished from the post-transcriptional processes of 5′ capping of RNA and degradation of RNA via non-RISC- or non-RNase H-mediated processes. Such “degradation” of an RNA can take several forms, e.g. deadenylation (removal of a 3′ poly(A) tail), and/or nuclease digestion of part or all of the body of the RNA by one or more of several endo- or exo-nucleases (e.g., RNase III, RNase P, RNase T1, RNase A (1, 2, 3, 4/5), oligonucleotidase, etc.).

[0099] By “homologous sequence” is meant, a nucleotide sequence that is shared by one or more polynucleotide sequences, such as genes, gene transcripts and/or non-coding polynucleotides. For example, a homologous sequence can be a nucleotide sequence that is shared by two or more genes encoding related but different proteins, such as different members of a gene family, different protein epitopes, different protein isoforms or completely divergent genes, such as a cytokine and its corresponding receptors. A homologous sequence can be a nucleotide sequence that is shared by two or more non-coding polynucleotides, such as noncoding DNA or RNA, regulatory sequences, introns, and sites of transcriptional control or regulation. Homologous sequences can also include conserved sequence regions shared by more than one polynucleotide sequence. Homology does not need to be perfect homology (e.g., 100%), as partially homologous sequences are also contemplated by the instant invention (e.g., 99%, 98%, 97%, 96%, 95%, 94%, 93%, 92%, 91%, 90%, 89%, 88%, 87%, 86%, 85%, 84%, 83%, 82%, 81%, 80% etc.). Indeed, design and use of the DsiRNA agents of the instant invention contemplates the possibility of using such DsiRNA agents not only against target RNAs of KRAS possessing perfect complementarity with the presently described DsiRNA agents, but also against target KRAS RNAs possessing sequences that are, e.g., only 99%, 98%, 97%, 96%, 95%, 94%, 93%, 92%, 91%, 90%, 89%, 88%, 87%, 86%, 85%, 84%, 83%, 82%, 81%, 80% etc. complementary to said DsiRNA agents. Similarly, it is contemplated that the presently described DsiRNA agents of the instant invention might be readily altered by the skilled artisan to enhance the extent of complementarity between said DsiRNA agents and a target KRAS RNA, e.g., of a specific allelic variant of KRAS (e.g., an allele of enhanced therapeutic interest). Indeed, DsiRNA agent sequences with insertions, deletions, and single point mutations relative to the target KRAS sequence can also be effective for inhibition. Alternatively, DsiRNA agent sequences with nucleotide analog substitutions or insertions can be effective for inhibition.

[0100] Sequence identity may be determined by sequence comparison and alignment algorithms known in the art. To determine the percent identity of two nucleic acid sequences (or of two amino acid sequences), the sequences are aligned for optimal comparison purposes (e.g., gaps can be introduced in the first sequence or second sequence for optimal alignment). The nucleotides (or amino acid residues) at corresponding nucleotide (or amino acid) positions are then compared. When a position in the first sequence is occupied by the same residue as the corresponding position in the second sequence, then the molecules are identical at that position. The percent identity between the two sequences is a function of the number of identical positions shared by the sequences (i.e., % homology=# of identical positions/total # of positions.times.100), optionally penalizing the score for the number of gaps introduced and/or length of gaps introduced.

[0101] The comparison of sequences and determination of percent identity between two sequences can be accomplished using a mathematical algorithm. In one embodiment, the alignment generated over a certain portion of the sequence aligned having sufficient identity but not over portions having low degree of identity (i.e., a local alignment). A preferred, non-limiting example of a local alignment algorithm utilized for the comparison of sequences is the algorithm of Karlin and Altschul (1990) Proc. Natl. Acad. Sci. USA 87:2264-68, modified as in Karlin and Altschul (1993) Proc. Natl. Acad. Sci. USA 90:5873-77. Such an algorithm is incorporated into the BLAST programs (version 2.0) of Altschul, et al. (1990) J. Mol. Biol. 215:403-10.

[0102] In another embodiment, the alignment is optimized by introducing appropriate gaps and percent identity is determined over the length of the aligned sequences (i.e., a gapped alignment). To obtain gapped alignments for comparison purposes, Gapped BLAST can be utilized as described in Altschul et al., (1997) Nucleic Acids Res. 25(17):3389-3402. In another embodiment, the alignment is optimized by introducing appropriate gaps and percent identity is determined over the entire length of the sequences aligned (i.e., a global alignment). A preferred, non-limiting example of a mathematical algorithm utilized for the global comparison of sequences is the algorithm of Myers and Miller, CABIOS (1989). Such an algorithm is incorporated into the ALIGN program (version 2.0) which is part of the GCG sequence alignment software package. When utilizing the ALIGN program for comparing amino acid sequences, a PAM120 weight residue table, a gap length penalty of 12, and a gap penalty of 4 can be used.

[0103] Greater than 80% sequence identity, e.g., 80%, 81%, 82%, 83%, 84%, 85%, 86%, 87%, 88%, 89%, 90%, 91%, 92%, 93%, 94%, 95%, 96%, 97%, 98%, 99% or even 100% sequence identity, between the DsiRNA antisense strand and the portion of the KRAS RNA sequence is preferred. Alternatively, the DsiRNA may be defined functionally as a nucleotide sequence (or oligonucleotide sequence) that is capable of hybridizing with a portion of the KRAS RNA (e.g., 400 mM NaCl, 40 mM PIPES pH 6.4, 1 mM EDTA, 50° C. or 70° C. hybridization for 12-16 hours; followed by washing). Additional preferred hybridization conditions include hybridization at 70° C. in 1×SSC or 50° C. in 1×SSC, 50% formamide followed by washing at 70° C. in 0.3×SSC or hybridization at 70° C. in 4×SSC or 50° C. in 4×SSC, 50% formamide followed by washing at 67° C. in 1×SSC. The hybridization temperature for hybrids anticipated to be less than 50 base pairs in length should be 5-10° C. less than the melting temperature (Tm) of the hybrid, where Tm is determined according to the following equations. For hybrids less than 18 base pairs in length, Tm(° C.)=2(# of A+T bases)+4(# of G+C bases). For hybrids between 18 and 49 base pairs in length, Tm(° C.)=81.5+16.6(log 10[Na+])+0.41 (% G+C)−(600/N), where N is the number of bases in the hybrid, and [Na+] is the concentration of sodium ions in the hybridization buffer ([Na+] for 1×SSC=0.165 M). Additional examples of stringency conditions for polynucleotide hybridization are provided in Sambrook, J., E. F. Fritsch, and T. Maniatis, 1989, Molecular Cloning: A Laboratory Manual, Cold Spring Harbor Laboratory Press, Cold Spring Harbor, N.Y., chapters 9 and 11, and Current Protocols in Molecular Biology, 1995, F. M. Ausubel et al., eds., John Wiley & Sons, Inc., sections 2.10 and 6.3-6.4. The length of the identical nucleotide sequences may be at least 10, 12, 15, 17, 20, 22, 25, 27 or 30 bases.

[0104] By “conserved sequence region” is meant, a nucleotide sequence of one or more regions in a polynucleotide does not vary significantly between generations or from one biological system, subject, or organism to another biological system, subject, or organism. The polynucleotide can include both coding and non-coding DNA and RNA.

[0105] By “sense region” is meant a nucleotide sequence of a DsiRNA molecule having complementarity to an antisense region of the DsiRNA molecule. In addition, the sense region of a DsiRNA molecule can comprise a nucleic acid sequence having homology with a target nucleic acid sequence.

[0106] By “antisense region” is meant a nucleotide sequence of a DsiRNA molecule having complementarity to a target nucleic acid sequence. In addition, the antisense region of a DsiRNA molecule comprises a nucleic acid sequence having complementarity to a sense region of the DsiRNA molecule.

[0107] As used herein, “antisense strand” refers to a single stranded nucleic acid molecule which has a sequence complementary to that of a target RNA. When the antisense strand contains modified nucleotides with base analogs, it is not necessarily complementary over its entire length, but must at least hybridize with a target RNA.

[0108] As used herein, “sense strand” refers to a single stranded nucleic acid molecule which has a sequence complementary to that of an antisense strand. When the antisense strand contains modified nucleotides with base analogs, the sense strand need not be complementary over the entire length of the antisense strand, but must at least duplex with the antisense strand.

[0109] As used herein, “guide strand” refers to a single stranded nucleic acid molecule of a dsRNA or dsRNA-containing molecule, which has a sequence sufficiently complementary to that of a target RNA to result in RNA interference. After cleavage of the dsRNA or dsRNA-containing molecule by Dicer, a fragment of the guide strand remains associated with RISC, binds a target RNA as a component of the RISC complex, and promotes cleavage of a target RNA by RISC. As used herein, the guide strand does not necessarily refer to a continuous single stranded nucleic acid and may comprise a discontinuity, preferably at a site that is cleaved by Dicer. A guide strand is an antisense strand.

[0110] As used herein, “passenger strand” refers to an oligonucleotide strand of a dsRNA or dsRNA-containing molecule, which has a sequence that is complementary to that of the guide strand. As used herein, the passenger strand does not necessarily refer to a continuous single stranded nucleic acid and may comprise a discontinuity, preferably at a site that is cleaved by Dicer. A passenger strand is a sense strand.

[0111] By “target nucleic acid” is meant a nucleic acid sequence whose expression, level or activity is to be modulated. The target nucleic acid can be DNA or RNA. For agents that target KRAS, in certain embodiments target nucleic acid is KRAS RNA. KRAS RNA target sites can also interchangeably be referenced by corresponding cDNA sequences. Levels of KRAS may also be targeted via targeting of upstream effectors of KRAS, or the effects of modulated or misregulated KRAS may also be modulated by targeting of molecules downstream of KRAS in the Ras signalling pathway.

[0112] By “complementarity” is meant that a nucleic acid can form hydrogen bond(s) with another nucleic acid sequence by either traditional Watson-Crick or other non-traditional types. In reference to the nucleic molecules of the present invention, the binding free energy for a nucleic acid molecule with its complementary sequence is sufficient to allow the relevant function of the nucleic acid to proceed, e.g., RNAi activity. Determination of binding free energies for nucleic acid molecules is well known in the art (see, e.g., Turner et al., 1987, CSH Symp. Quant. Biol. LII pp. 123-133; Frier et al., 1986, Proc. Nat. Acad. Sci. USA 83:9373-9377; Turner et al., 1987, J. Am. Chem. Soc. 109:3783-3785). A percent complementarity indicates the percentage of contiguous residues in a nucleic acid molecule that can form hydrogen bonds (e.g., Watson-Crick base pairing) with a second nucleic acid sequence (e.g., 5, 6, 7, 8, 9, or 10 nucleotides out of a total of 10 nucleotides in the first oligonucleotide being based paired to a second nucleic acid sequence having 10 nucleotides represents 50%, 60%, 70%, 80%, 90%, and 100% complementary respectively). “Perfectly complementary” means that all the contiguous residues of a nucleic acid sequence will hydrogen bond with the same number of contiguous residues in a second nucleic acid sequence. In one embodiment, a DsiRNA molecule of the invention comprises 19 to 30 (e.g., 19, 20, 21, 22, 23, 24, 25, 26, 27, 28, 29, or 30 or more) nucleotides that are complementary to one or more target nucleic acid molecules or a portion thereof.

[0113] In one embodiment, DsiRNA molecules of the invention that down regulate or reduce KRAS gene expression are used for treating, preventing or reducing KRAS-related diseases or disorders (e.g., cancer) in a subject or organism.

[0114] In one embodiment of the present invention, each sequence of a DsiRNA molecule of the invention is independently 25 to 35 nucleotides in length, in specific embodiments 25, 26, 27, 28, 29, 30, 31, 32, 33, 34 or 35 nucleotides in length. In another embodiment, the DsiRNA duplexes of the invention independently comprise 25 to 30 base pairs (e.g., 25, 26, 27, 28, 29, or 30). In another embodiment, one or more strands of the DsiRNA molecule of the invention independently comprises 19 to 35 nucleotides (e.g., 19, 20, 21, 22, 23, 24, 25, 26, 27, 28, 29, 30, 31, 32, 33, 34 or 35) that are complementary to a target (KRAS) nucleic acid molecule. In certain embodiments, a DsiRNA molecule of the invention possesses a length of duplexed nucleotides between 25 and 34 nucleotides in length (e.g., 25, 26, 27, 28, 29, 30, 31, 32, 33 or 34 nucleotides in length; optionally, all such nucleotides base pair with cognate nucleotides of the opposite strand). (Exemplary DsiRNA molecules of the invention are shown in FIGS. 1 and 4, and below.

[0115] As used herein “cell” is used in its usual biological sense, and does not refer to an entire multicellular organism, e.g., specifically does not refer to a human. The cell can be present in an organism, e.g., birds, plants and mammals such as humans, cows, sheep, apes, monkeys, swine, dogs, and cats. The cell can be prokaryotic (e.g., bacterial cell) or eukaryotic (e.g., mammalian or plant cell). The cell can be of somatic or germ line origin, totipotent or pluripotent, dividing or non-dividing. The cell can also be derived from or can comprise a gamete or embryo, a stem cell, or a fully differentiated cell. Within certain aspects, the term “cell” refers specifically to mammalian cells, such as human cells, that contain one or more isolated dsRNA molecules of the present disclosure. In particular aspects, a cell processes dsRNAs or dsRNA-containing molecules resulting in RNA interference of target nucleic acids, and contains proteins and protein complexes required for RNAi, e.g., Dicer and RISC.

[0116] The DsiRNA molecules of the invention are added directly, or can be complexed with cationic lipids, packaged within liposomes, or otherwise delivered to target cells or tissues. The nucleic acid or nucleic acid complexes can be locally administered to relevant tissues ex vivo, or in vivo through direct dermal application, transdermal application, or injection, with or without their incorporation in biopolymers. In particular embodiments, the nucleic acid molecules of the invention comprise sequences shown in FIGS. 1 and 4, and the below exemplary structures. Examples of such nucleic acid molecules consist essentially of sequences defined in these figures and exemplary structures. Furthermore, where such agents are modified in accordance with the below description of modification patterning of DsiRNA agents, chemically modified forms of constructs described in FIGS. 1 and 4, and the below exemplary structures can be used in all uses described for the DsiRNA agents of FIGS. 1 and 4, and the below exemplary structures.

[0117] In another aspect, the invention provides mammalian cells containing one or more DsiRNA molecules of this invention. The one or more DsiRNA molecules can independently be targeted to the same or different sites.

[0118] By “RNA” is meant a molecule comprising at least one ribonucleotide residue. By “ribonucleotide” is meant a nucleotide with a hydroxyl group at the 2′ position of a β-D-ribofuranose moiety. The terms include double-stranded RNA, single-stranded RNA, isolated RNA such as partially purified RNA, essentially pure RNA, synthetic RNA, recombinantly produced RNA, as well as altered RNA that differs from naturally occurring RNA by the addition, deletion, substitution and/or alteration of one or more nucleotides. Such alterations can include addition of non-nucleotide material, such as to the end(s) of the DsiRNA or internally, for example at one or more nucleotides of the RNA. Nucleotides in the RNA molecules of the instant invention can also comprise non-standard nucleotides, such as non-naturally occurring nucleotides or chemically synthesized nucleotides or deoxynucleotides. These altered RNAs can be referred to as analogs or analogs of naturally-occurring RNA.

[0119] By “subject” is meant an organism, which is a donor or recipient of explanted cells or the cells themselves. “Subject” also refers to an organism to which the DsiRNA agents of the invention can be administered. A subject can be a mammal or mammalian cells, including a human or human cells.

[0120] The phrase “pharmaceutically acceptable carrier” refers to a carrier for the administration of a therapeutic agent. Exemplary carriers include saline, buffered saline, dextrose, water, glycerol, ethanol, and combinations thereof. For drugs administered orally, pharmaceutically acceptable carriers include, but are not limited to pharmaceutically acceptable excipients such as inert diluents, disintegrating agents, binding agents, lubricating agents, sweetening agents, flavoring agents, coloring agents and preservatives. Suitable inert diluents include sodium and calcium carbonate, sodium and calcium phosphate, and lactose, while corn starch and alginic acid are suitable disintegrating agents. Binding agents may include starch and gelatin, while the lubricating agent, if present, will generally be magnesium stearate, stearic acid or talc. If desired, the tablets may be coated with a material such as glyceryl monostearate or glyceryl distearate, to delay absorption in the gastrointestinal tract. The pharmaceutically acceptable carrier of the disclosed dsRNA compositions may be micellar structures, such as a liposomes, capsids, capsoids, polymeric nanocapsules, or polymeric microcapsules.

[0121] Polymeric nanocapsules or microcapsules facilitate transport and release of the encapsulated or bound dsRNA into the cell. They include polymeric and monomeric materials, especially including polybutylcyanoacrylate. A summary of materials and fabrication methods has been published (see Kreuter, 1991). The polymeric materials which are formed from monomeric and/or oligomeric precursors in the polymerization/nanoparticle generation step, are per se known from the prior art, as are the molecular weights and molecular weight distribution of the polymeric material which a person skilled in the field of manufacturing nanoparticles may suitably select in accordance with the usual skill.

[0122] Various methodologies of the instant invention include step that involves comparing a value, level, feature, characteristic, property, etc. to a “suitable control”, referred to interchangeably herein as an “appropriate control”. A “suitable control” or “appropriate control” is a control or standard familiar to one of ordinary skill in the art useful for comparison purposes. In one embodiment, a “suitable control” or “appropriate control” is a value, level, feature, characteristic, property, etc. determined prior to performing an RNAi methodology, as described herein. For example, a transcription rate, mRNA level, translation rate, protein level, biological activity, cellular characteristic or property, genotype, phenotype, etc. can be determined prior to introducing an RNA silencing agent (e.g., DsiRNA) of the invention into a cell or organism. In another embodiment, a “suitable control” or “appropriate control” is a value, level, feature, characteristic, property, etc. determined in a cell or organism, e.g., a control or normal cell or organism, exhibiting, for example, normal traits. In yet another embodiment, a “suitable control” or “appropriate control” is a predefined value, level, feature, characteristic, property, etc.

[0123] The term “in vitro” has its art recognized meaning, e.g., involving purified reagents or extracts, e.g., cell extracts. The term “in vivo” also has its art recognized meaning, e.g., involving living cells, e.g., immortalized cells, primary cells, cell lines, and/or cells in an organism.

[0124] “Treatment”, or “treating” as used herein, is defined as the application or administration of a therapeutic agent (e.g., a DsiRNA agent or a vector or transgene encoding same) to a patient, or application or administration of a therapeutic agent to an isolated tissue or cell line from a patient, who has a disorder with the purpose to cure, heal, alleviate, relieve, alter, remedy, ameliorate, improve or affect the disease or disorder, or symptoms of the disease or disorder. The term “treatment” or “treating” is also used herein in the context of administering agents prophylactically. The term “effective dose” or “effective dosage” is defined as an amount sufficient to achieve or at least partially achieve the desired effect. The term “therapeutically effective dose” is defined as an amount sufficient to cure or at least partially arrest the disease and its complications in a patient already suffering from the disease. The term “patient” includes human and other mammalian subjects that receive either prophylactic or therapeutic treatment.

### Structures of Anti-KRAS DsiRNA Agents

[0125] In certain embodiments, the anti-KRAS DsiRNA agents of the invention can have the following structures:

[0126] In one such embodiment, the DsiRNA comprises:

5′-pXXXXXXXXXXXXXXXXXXXXXXXXX-3′
3′-YXXXXXXXXXXXXXXXXXXXXXXXXXp-5′

wherein “X”=RNA, “p”=a phosphate group and “Y” is an overhang domain comprised of 1-4 RNA monomers that are optionally 2′-O-methyl RNA monomers. In a related embodiment, the DsiRNA comprises:

5′-pXXXXXXXXXXXXXXXXXXXXXXXDD-3′
3′-YXXXXXXXXXXXXXXXXXXXXXXXXXp-5′

wherein “X”=RNA, “p”=a phosphate group, “Y” is an overhang domain comprised of 1-4 RNA monomers that are optionally 2′-O-methyl RNA monomers, and “D”=DNA. In one embodiment, the top strand is the sense strand, and the bottom strand is the antisense strand. Alternatively, the bottom strand is the sense strand and the top strand is the antisense strand.

[0127] In an additional embodiment, the DsiRNA comprises:

5′-pXXXXXXXXXXXXXXXXXXXXXXXXX-3′
3′-YXXXXXXXXXXXXXXXXXXXXXXXXXp-5′

wherein “X”=RNA, “p”=a phosphate group, “X”=2′-O-methyl RNA, “Y” is an overhang domain comprised of 1-4 RNA monomers that are optionally 2′-O-methyl RNA monomers and underlined residues are 2′-O-methyl RNA monomers. In a related embodiment, the DsiRNA comprises:

5′-pXXXXXXXXXXXXXXXXXXXXXXXDD-3′
3′-YXXXXXXXXXXXXXXXXXXXXXXXXXp-5′

wherein “X”=RNA, “p”=a phosphate group, “X”=2′-O-methyl RNA, “Y” is an overhang domain comprised of 1-4 RNA monomers that are optionally 2′-O-methyl RNA monomers and underlined residues are 2′-O-methyl RNA monomers, and “D”=DNA. The top strand is the sense strand, and the bottom strand is the antisense strand.

[0128] In another such embodiment, the DsiRNA comprises:

5′-pXXXXXXXXXXXXXXXXXXXXXXXXX-3′
3′-YXXXXXXXXXXXXXXXXXXXXXXXXXp-5′

wherein “X”=RNA, “p”=a phosphate group, “X”=2′-O-methyl RNA, “Y” is an overhang domain comprised of 1-4 RNA monomers that are optionally 2′-O-methyl RNA monomers and underlined residues are 2′-O-methyl RNA monomers. In a related embodiment, the DsiRNA comprises:

5′-pXXXXXXXXXXXXXXXXXXXXXXXDD-3′
3′-YXXXXXXXXXXXXXXXXXXXXXXXXXp-5′

wherein “X”=RNA, “p”=a phosphate group, “X”=2′-O-methyl RNA, “Y” is an overhang domain comprised of 1-4 RNA monomers that are optionally 2′-O-methyl RNA monomers, underlined residues are 2′-O-methyl RNA monomers, and “D”=DNA. The top strand is the sense strand, and the bottom strand is the antisense strand.

[0129] In another such embodiment, the DsiRNA comprises:

5′-pXXXXXXXXXXXXXXXXXXXXXXXXX-3′
3′-YXXXXXXXXXXXXXXXXXXXXXXXXXp-5′

wherein “X”=RNA, “p”=a phosphate group, “X”=2′-O-methyl RNA, “Y” is an overhang domain comprised of 1-4 RNA monomers that are optionally 2′-O-methyl RNA monomers and underlined residues are 2′-O-methyl RNA monomers. In a related embodiment, the DsiRNA comprises:

5′-pXXXXXXXXXXXXXXXXXXXXXXXDD-3′
3′-YXXXXXXXXXXXXXXXXXXXXXXXXXp-5′

wherein “X”=RNA, “p”=a phosphate group, “X”=2′-O-methyl RNA, “Y” is an overhang domain comprised of 1-4 RNA monomers that are optionally 2′-O-methyl RNA monomers, underlined residues are 2′-O-methyl RNA monomers, and “D”=DNA. The top strand is the sense strand, and the bottom strand is the antisense strand.

[0130] In further embodiments, the DsiRNA comprises:

5′-pXXXXXXXXXXXXXXXXXXXXXXXXX-3′
3′-YXXXXXXXXXXXXXXXXXXXXXXXXXp-5′

wherein “X”=RNA, “p”=a phosphate group, “X”=2′-O-methyl RNA, “Y” is an overhang domain comprised of 1-4 RNA monomers that are optionally 2′-O-methyl RNA monomers and underlined residues are 2′-O-methyl RNA monomers. In a related embodiment, the DsiRNA comprises:

5′-pXXXXXXXXXXXXXXXXXXXXXXXDD-3′
3′-YXXXXXXXXXXXXXXXXXXXXXXXXXp-5′

wherein “X”=RNA, “p”=a phosphate group, “X”=2′-O-methyl RNA, “Y” is an overhang domain comprised of 1-4 RNA monomers that are optionally 2′-O-methyl RNA monomers, underlined residues are 2′-O-methyl RNA monomers, and “D”=DNA. The top strand is the sense strand, and the bottom strand is the antisense strand. In one related embodiment, the DsiRNA comprises:

5′-pXXXXXXXXXXXXXXXXXXXXXXXXX-3′
3′-XXXXXXXXXXXXXXXXXXXXXXXXXXXp-5′

wherein “X”=RNA, “p”=a phosphate group and “X”=2′-O-methyl RNA. In a further related embodiment, the DsiRNA comprises:

5′-pXXXXXXXXXXXXXXXXXXXXXXXDD-3′
3′-XXXXXXXXXXXXXXXXXXXXXXXXXXXp-5′

wherein “X”=RNA, “p”=a phosphate group, “X”=2′-O-methyl RNA, and “D”=DNA. The top strand is the sense strand, and the bottom strand is the antisense strand.

[0131] In additional embodiments, the DsiRNA comprises:

5′-pXXXXXXXXXXXXXXXXXXXXXXXXX-3′
3′-YXXXXXXXXXXXXXXXXXXXXXXXXXp-5′

wherein “X”=RNA, “p”=a phosphate group, “X”=2′-O-methyl RNA, “Y” is an overhang domain comprised of 1-4 RNA monomers that are optionally 2′-O-methyl RNA monomers and underlined residues are 2′-O-methyl RNA monomers. In a related embodiment, the DsiRNA comprises:

5′-pXXXXXXXXXXXXXXXXXXXXXXXDD-3′
3′-YXXXXXXXXXXXXXXXXXXXXXXXXXp-5′

wherein “X”=RNA, “p”=a phosphate group, “X”=2′-O-methyl RNA, “Y” is an overhang domain comprised of 1-4 RNA monomers that are optionally 2′-O-methyl RNA monomers, underlined residues are 2′-O-methyl RNA monomers, and “D”=DNA. The top strand is the sense strand, and the bottom strand is the antisense strand. The top strand is the sense strand, and the bottom strand is the antisense strand. In another related embodiment, the DsiRNA comprises:

5′-pXXXXXXXXXXXXXXXXXXXXXXXXX-3′
3′-XXXXXXXXXXXXXXXXXXXXXXXXXXXp-5′

wherein “X”=RNA, “p”=a phosphate group and “X”=2′-O-methyl RNA. The top strand is the sense strand, and the bottom strand is the antisense strand. In a further related embodiment, the DsiRNA comprises:

5′-pXXXXXXXXXXXXXXXXXXXXXXXDD-3′
3′-XXXXXXXXXXXXXXXXXXXXXXXXXXXp-5′

wherein “X”=RNA, “p”=a phosphate group, “X”=2′-O-methyl RNA, and “D”=DNA. The top strand is the sense strand, and the bottom strand is the antisense strand.

[0132] In other embodiments, the DsiRNA comprises:

5′-pXXXXXXXXXXXXXXXXXXXXXXXXX-3′
3′-YXXXXXXXXXXXXXXXXXXXXXXXXXp-5′

wherein “X”=RNA, “p”=a phosphate group, “X”=2′-O-methyl RNA, “Y” is an overhang domain comprised of 1-4 RNA monomers that are optionally 2′-O-methyl RNA monomers and underlined residues are 2′-O-methyl RNA monomers. The top strand is the sense strand, and the bottom strand is the antisense strand. In a related embodiment, the DsiRNA comprises:

5′-pXXXXXXXXXXXXXXXXXXXXXXXDD-3′
3′-YXXXXXXXXXXXXXXXXXXXXXXXXXp-5′

wherein “X”=RNA, “p”=a phosphate group, “X”=2′-O-methyl RNA, “Y” is an overhang domain comprised of 1-4 RNA monomers that are optionally 2′-O-methyl RNA monomers, underlined residues are 2′-O-methyl RNA monomers, and “D”=DNA. The top strand is the sense strand, and the bottom strand is the antisense strand. In one related embodiment, the DsiRNA comprises:

5′-pXXXXXXXXXXXXXXXXXXXXXXXXX-3′
3′-XXXXXXXXXXXXXXXXXXXXXXXXXXXp-5′

wherein “X”=RNA, “p”=a phosphate group and “X”=2′-O-methyl RNA. The top strand is the sense strand, and the bottom strand is the antisense strand. In another related embodiment, the DsiRNA comprises:

5′-pXXXXXXXXXXXXXXXXXXXXXXXDD-3′
3′-XXXXXXXXXXXXXXXXXXXXXXXXXXXp-5′

wherein “X”=RNA, “p”=a phosphate group, “X”=2′-O-methyl RNA, and “D”=DNA. The top strand is the sense strand, and the bottom strand is the antisense strand.

[0133] In further embodiments, the DsiRNA comprises:

5′-pXXXXXXXXXXXXXXXXXXXXXXXXX-3′
3′-YXXXXXXXXXXXXXXXXXXXXXXXXXp-5′

wherein “X”=RNA, “p”=a phosphate group, “X”=2′-O-methyl RNA, “Y” is an overhang domain comprised of 1-4 RNA monomers that are optionally 2′-O-methyl RNA monomers and underlined residues are 2′-O-methyl RNA monomers. The top strand is the sense strand, and the bottom strand is the antisense strand. In a related embodiment, the DsiRNA comprises:

5′-pXXXXXXXXXXXXXXXXXXXXXXXDD-3′
3′-YXXXXXXXXXXXXXXXXXXXXXXXXXp-5′

wherein “X”=RNA, “p”=a phosphate group, “X”=2′-O-methyl RNA, “Y” is an overhang domain comprised of 1-4 RNA monomers that are optionally 2′-O-methyl RNA monomers, underlined residues are 2′-O-methyl RNA monomers, and “D”=DNA. The top strand is the sense strand, and the bottom strand is the antisense strand. In one related embodiment, the DsiRNA comprises:

5′-pXXXXXXXXXXXXXXXXXXXXXXXXX-3′
3′-XXXXXXXXXXXXXXXXXXXXXXXXXXXp-5′

wherein “X”=RNA, “p”=a phosphate group and “X”=2′-O-methyl RNA. The top strand is the sense strand, and the bottom strand is the antisense strand. In a further related embodiment, the DsiRNA comprises:

5′-pXXXXXXXXXXXXXXXXXXXXXXXDD-3′
3′-XXXXXXXXXXXXXXXXXXXXXXXXXXXp-5′

wherein “X”=RNA, “p”=a phosphate group, “X”=2′-O-methyl RNA, and “D”=DNA. The top strand is the sense strand, and the bottom strand is the antisense strand.

[0134] In additional embodiments, the DsiRNA comprises:

5′-pXXXXXXXXXXXXXXXXXXXXXXXXX-3′
3′-YXXXXXXXXXXXXXXXXXXXXXXXXXp-5′

wherein “X”=RNA, “p”=a phosphate group, “X”=2′-O-methyl RNA, “Y” is an overhang domain comprised of 1-4 RNA monomers that are optionally 2′-O-methyl RNA monomers and underlined residues are 2′-O-methyl RNA monomers. The top strand is the sense strand, and the bottom strand is the antisense strand. In a related embodiment, the DsiRNA comprises:

5′-pXXXXXXXXXXXXXXXXXXXXXXXDD-3′
3′-YXXXXXXXXXXXXXXXXXXXXXXXXXp-5′

wherein “X”=RNA, “p”=a phosphate group, “X”=2′-O-methyl RNA, “Y” is an overhang domain comprised of 1-4 RNA monomers that are optionally 2′-O-methyl RNA monomers, underlined residues are 2′-O-methyl RNA monomers, and “D”=DNA. The top strand is the sense strand, and the bottom strand is the antisense strand. In another related embodiment, the DsiRNA comprises:

5′-pXXXXXXXXXXXXXXXXXXXXXXXXX-3′
3′-XXXXXXXXXXXXXXXXXXXXXXXXXXXp-5′

wherein “X”=RNA, “p”=a phosphate group and “X”=2′-O-methyl RNA. The top strand is the sense strand, and the bottom strand is the antisense strand. In a further related embodiment, the DsiRNA comprises:

5′-pXXXXXXXXXXXXXXXXXXXXXXXDD-3′
3′-XXXXXXXXXXXXXXXXXXXXXXXXXXXp-5′

wherein “X”=RNA, “p”=a phosphate group, “X”=2′-O-methyl RNA, and “D”=DNA. The top strand is the sense strand, and the bottom strand is the antisense strand.

[0135] In other embodiments, the DsiRNA comprises:

5′-pXXXXXXXXXXXXXXXXXXXXXXXXX-3′
3′-YXXXXXXXXXXXXXXXXXXXXXXXXXp-5′

wherein “X”=RNA, “p”=a phosphate group, “X”=2′-O-methyl RNA, “Y” is an overhang domain comprised of 1-4 RNA monomers that are optionally 2′-O-methyl RNA monomers and underlined residues are 2′-O-methyl RNA monomers. The top strand is the sense strand, and the bottom strand is the antisense strand. In one related embodiment, the DsiRNA comprises:

5′-pXXXXXXXXXXXXXXXXXXXXXXXDD-3′
3′-YXXXXXXXXXXXXXXXXXXXXXXXXXp-5′

wherein “X”=RNA, “p”=a phosphate group, “X”=2′-O-methyl RNA, “Y” is an overhang domain comprised of 1-4 RNA monomers that are optionally 2′-O-methyl RNA monomers, underlined residues are 2′-O-methyl RNA monomers, and “D”=DNA. The top strand is the sense strand, and the bottom strand is the antisense strand. In another related embodiment, the DsiRNA comprises:

5′-pXXXXXXXXXXXXXXXXXXXXXXXXX-3′
3′-XXXXXXXXXXXXXXXXXXXXXXXXXXXp-5′

wherein “X”=RNA, “p”=a phosphate group and “X”=2′-O-methyl RNA. The top strand is the sense strand, and the bottom strand is the antisense strand. In a further related embodiment, the DsiRNA comprises:

5′-pXXXXXXXXXXXXXXXXXXXXXXXDD-3′
3′-XXXXXXXXXXXXXXXXXXXXXXXXXXXp-5′

wherein “X”=RNA, “p”=a phosphate group, “X”=2′-O-methyl RNA, and “D”=DNA. The top strand is the sense strand, and the bottom strand is the antisense strand.

[0136] In additional embodiments, the DsiRNA comprises:

5′-pXXXXXXXXXXXXXXXXXXXXXXXXX-3′
3′-YXXXXXXXXXXXXXXXXXXXXXXXXXp-5′

wherein “X”=RNA, “p”=a phosphate group, “X”=2′-O-methyl RNA, “Y” is an overhang domain comprised of 1-4 RNA monomers that are optionally 2′-O-methyl RNA monomers and underlined residues are 2′-O-methyl RNA monomers. The top strand is the sense strand, and the bottom strand is the antisense strand. In a related embodiment, the DsiRNA comprises:

5′-pXXXXXXXXXXXXXXXXXXXXXXXDD-3′
3′-YXXXXXXXXXXXXXXXXXXXXXXXXXp-5′

wherein “X”=RNA, “p”=a phosphate group, “X”=2′-O-methyl RNA, “Y” is an overhang domain comprised of 1-4 RNA monomers that are optionally 2′-O-methyl RNA monomers, underlined residues are 2′-O-methyl RNA monomers, and “D”=DNA. The top strand is the sense strand, and the bottom strand is the antisense strand. In another related embodiment, the DsiRNA comprises:

5′-pXXXXXXXXXXXXXXXXXXXXXXXXX-3′
3′-XXXXXXXXXXXXXXXXXXXXXXXXXXXp-5′

wherein “X”=RNA, “p”=a phosphate group and “X”=2′-O-methyl RNA. The top strand is the sense strand, and the bottom strand is the antisense strand. In a further related embodiment, the DsiRNA comprises:

5′-pXXXXXXXXXXXXXXXXXXXXXXXDD-3′
3′-XXXXXXXXXXXXXXXXXXXXXXXXXXXp-5′

wherein “X”=RNA, “p”=a phosphate group, “X”=2′-O-methyl RNA, and “D”=DNA. The top strand is the sense strand, and the bottom strand is the antisense strand.

[0137] In further embodiments, the DsiRNA comprises:

5′-pXXXXXXXXXXXXXXXXXXXXXXXXX-3′
3′-YXXXXXXXXXXXXXXXXXXXXXXXXXp-5′

wherein “X”=RNA, “p”=a phosphate group, “X”=2′-O-methyl RNA, “Y” is an overhang domain comprised of 1-4 RNA monomers that are optionally 2′-O-methyl RNA monomers and underlined residues are 2′-O-methyl RNA monomers. The top strand is the sense strand, and the bottom strand is the antisense strand. In a related embodiment, the DsiRNA comprises:

5′-pXXXXXXXXXXXXXXXXXXXXXXXDD-3′
3′-YXXXXXXXXXXXXXXXXXXXXXXXXXp-5′

wherein “X”=RNA, “p”=a phosphate group, “X”=2′-O-methyl RNA, “Y” is an overhang domain comprised of 1-4 RNA monomers that are optionally 2′-O-methyl RNA monomers, underlined residues are 2′-O-methyl RNA monomers, and “D”=DNA. The top strand is the sense strand, and the bottom strand is the antisense strand. In another related embodiment, the DsiRNA comprises:

5′-pXXXXXXXXXXXXXXXXXXXXXXXXX-3′
3′-XXXXXXXXXXXXXXXXXXXXXXXXXXXp-5′

wherein “X”=RNA, “p”=a phosphate group and “X”=2′-O-methyl RNA. The top strand is the sense strand, and the bottom strand is the antisense strand. In a further related embodiment, the

5′-pXXXXXXXXXXXXXXXXXXXXXXXDD-3′
3′-XXXXXXXXXXXXXXXXXXXXXXXXXXXp-5′

wherein “X”=RNA, “p”=a phosphate group, “X”=2′-O-methyl RNA, and “D”=DNA. The top strand is the sense strand, and the bottom strand is the antisense strand.

[0138] In additional embodiments, the DsiRNA comprises:

5′-pXXXXXXXXXXXXXXXXXXXXXXXXX-3′
3′-YXXXXXXXXXXXXXXXXXXXXXXXXXp-5′

wherein “X”=RNA, “p”=a phosphate group, “X”=2′-O-methyl RNA, “Y” is an overhang domain comprised of 1-4 RNA monomers that are optionally 2′-O-methyl RNA monomers and underlined residues are 2′-O-methyl RNA monomers. The top strand is the sense strand, and the bottom strand is the antisense strand. In one related embodiment, the DsiRNA comprises:

5′-pXXXXXXXXXXXXXXXXXXXXXXXDD-3′
3′-YXXXXXXXXXXXXXXXXXXXXXXXXXp-5′

wherein “X”=RNA, “p”=a phosphate group, “X”=2′-O-methyl RNA, “Y” is an overhang domain comprised of 1-4 RNA monomers that are optionally 2′-O-methyl RNA monomers, underlined residues are 2′-O-methyl RNA monomers, and “D”=DNA. The top strand is the sense strand, and the bottom strand is the antisense strand. In another related embodiment, the DsiRNA comprises:

5′-pXXXXXXXXXXXXXXXXXXXXXXXXX-3′
3′-XXXXXXXXXXXXXXXXXXXXXXXXXXXp-5′

wherein “X”=RNA, “p”=a phosphate group and “X”=2′-O-methyl RNA. The top strand is the sense strand, and the bottom strand is the antisense strand. In a further related embodiment, the DsiRNA comprises:

5′-pXXXXXXXXXXXXXXXXXXXXXXXDD-3′
3′-XXXXXXXXXXXXXXXXXXXXXXXXXXXp-5′

wherein “X”=RNA, “p”=a phosphate group, “X”=2′-O-methyl RNA, and “D”=DNA. The top strand is the sense strand, and the bottom strand is the antisense strand.

[0139] In other embodiments, the DsiRNA comprises:

5′-pXXXXXXXXXXXXXXXXXXXXXXXXX-3′
3′-YXXXXXXXXXXXXXXXXXXXXXXXXXp-5′

wherein “X”=RNA, “p”=a phosphate group, “X”=2′-O-methyl RNA, “Y” is an overhang domain comprised of 1-4 RNA monomers that are optionally 2′-O-methyl RNA monomers and underlined residues are 2′-O-methyl RNA monomers. The top strand is the sense strand, and the bottom strand is the antisense strand. In a related embodiment, the DsiRNA comprises:

5′-pXXXXXXXXXXXXXXXXXXXXXXXDD-3′
3′-YXXXXXXXXXXXXXXXXXXXXXXXXXp-5′

wherein “X”=RNA, “p”=a phosphate group, “X”=2′-O-methyl RNA, “Y” is an overhang domain comprised of 1-4 RNA monomers that are optionally 2′-O-methyl RNA monomers, underlined residues are 2′-O-methyl RNA monomers, and “D”=DNA. The top strand is the sense strand, and the bottom strand is the antisense strand. In another related embodiment, the DsiRNA comprises:

5′-pXXXXXXXXXXXXXXXXXXXXXXXXX-3′
3′-XXXXXXXXXXXXXXXXXXXXXXXXXXXp-5′

wherein “X”=RNA, “p”=a phosphate group and “X”=2′-O-methyl RNA. The top strand is the sense strand, and the bottom strand is the antisense strand. In a further related embodiment, the DsiRNA comprises:

5′-pXXXXXXXXXXXXXXXXXXXXXXXDD-3′
3′-XXXXXXXXXXXXXXXXXXXXXXXXXXXp-5′

wherein “X”=RNA, “p”=a phosphate group, “X”=2′-O-methyl RNA, and “D”=DNA. The top strand is the sense strand, and the bottom strand is the antisense strand.

[0140] In further embodiments, the DsiRNA comprises:

5′-pXXXXXXXXXXXXXXXXXXXXXXXXX-3′
3′-YXXXXXXXXXXXXXXXXXXXXXXXXXp-5′

wherein “X”=RNA, “p”=a phosphate group, “X”=2′-O-methyl RNA, “Y” is an overhang domain comprised of 1-4 RNA monomers that are optionally 2′-O-methyl RNA monomers and underlined residues are 2′-O-methyl RNA monomers. The top strand is the sense strand, and the bottom strand is the antisense strand. In one related embodiment, the DsiRNA comprises:

5′-pXXXXXXXXXXXXXXXXXXXXXXXDD-3′
3′-YXXXXXXXXXXXXXXXXXXXXXXXXXp-5′

wherein “X”=RNA, “p”=a phosphate group, “X”=2′-O-methyl RNA, “Y” is an overhang domain comprised of 1-4 RNA monomers that are optionally 2′-O-methyl RNA monomers, underlined residues are 2′-O-methyl RNA monomers, and “D”=DNA. The top strand is the sense strand, and the bottom strand is the antisense strand. In another related embodiment, the DsiRNA comprises:

5′-pXXXXXXXXXXXXXXXXXXXXXXXXX-3′
3′-XXXXXXXXXXXXXXXXXXXXXXXXXXXp-5′

wherein “X”=RNA, “p”=a phosphate group and “X”=2′-O-methyl RNA. The top strand is the sense strand, and the bottom strand is the antisense strand. In a further related embodiment, the DsiRNA comprises:

5′-pXXXXXXXXXXXXXXXXXXXXXXXDD-3′
3′-XXXXXXXXXXXXXXXXXXXXXXXXXXXp-5′

wherein “X”=RNA, “p”=a phosphate group, “X”=2′-O-methyl RNA, and “D”=DNA. The top strand is the sense strand, and the bottom strand is the antisense strand.

[0141] In additional embodiments, the DsiRNA comprises:

5′-pXXXXXXXXXXXXXXXXXXXXXXXXX-3′
3′-YXXXXXXXXXXXXXXXXXXXXXXXXXp-5′

wherein “X”=RNA, “p”=a phosphate group, “X”=2′-O-methyl RNA, “Y” is an overhang domain comprised of 1-4 RNA monomers that are optionally 2′-O-methyl RNA monomers and underlined residues are 2′-O-methyl RNA monomers. The top strand is the sense strand, and the bottom strand is the antisense strand. In one related embodiment, the DsiRNA comprises:

5′-pXXXXXXXXXXXXXXXXXXXXXXXDD-3′
3′-YXXXXXXXXXXXXXXXXXXXXXXXXXp-5′

wherein “X”=RNA, “p”=a phosphate group, “X”=2′-O-methyl RNA, “Y” is an overhang domain comprised of 1-4 RNA monomers that are optionally 2′-O-methyl RNA monomers, underlined residues are 2′-O-methyl RNA monomers, and “D”=DNA. The top strand is the sense strand, and the bottom strand is the antisense strand. In another related embodiment, the DsiRNA comprises:

5′-pXXXXXXXXXXXXXXXXXXXXXXXXX-3′
3′-XXXXXXXXXXXXXXXXXXXXXXXXXXXp-5′

wherein “X”=RNA, “p”=a phosphate group and “X”=2′-O-methyl RNA. The top strand is the sense strand, and the bottom strand is the antisense strand. In a further related embodiment, the

5′-pXXXXXXXXXXXXXXXXXXXXXXXDD-3′
3′-XXXXXXXXXXXXXXXXXXXXXXXXXXXp-5′

wherein “X”=RNA, “p”=a phosphate group, “X”=2′-O-methyl RNA, and “D”=DNA. The top strand is the sense strand, and the bottom strand is the antisense strand.

[0142] In further embodiments, the DsiRNA comprises:

5′-pXXXXXXXXXXXXXXXXXXXXXXXXX-3′
3′-YXXXXXXXXXXXXXXXXXXXXXXXXXp-5′

wherein “X”=RNA, “p”=a phosphate group, “X”=2′-O-methyl RNA, “Y” is an overhang domain comprised of 1-4 RNA monomers that are optionally 2′-O-methyl RNA monomers and underlined residues are 2′-O-methyl RNA monomers. The top strand is the sense strand, and the bottom strand is the antisense strand. In one related embodiment, the DsiRNA comprises:

5′-pXXXXXXXXXXXXXXXXXXXXXXXDD-3′
3′-YXXXXXXXXXXXXXXXXXXXXXXXXXp-5′

wherein “X”=RNA, “p”=a phosphate group, “X”=2′-O-methyl RNA, “Y” is an overhang domain comprised of 1-4 RNA monomers that are optionally 2′-O-methyl RNA monomers, underlined residues are 2′-O-methyl RNA monomers, and “D”=DNA. The top strand is the sense strand, and the bottom strand is the antisense strand. In another related embodiment, the DsiRNA comprises:

5′-pXXXXXXXXXXXXXXXXXXXXXXXXX-3′
3′-XXXXXXXXXXXXXXXXXXXXXXXXXXXp-5′

wherein “X”=RNA, “p”=a phosphate group and “X”=2′-O-methyl RNA. The top strand is the sense strand, and the bottom strand is the antisense strand. In a further related embodiment, the DsiRNA comprises:

5′-pXXXXXXXXXXXXXXXXXXXXXXXDD-3′
3′-XXXXXXXXXXXXXXXXXXXXXXXXXXXp-5′

wherein “X”=RNA, “p”=a phosphate group, “X”=2′-O-methyl RNA, and “D”=DNA. The top strand is the sense strand, and the bottom strand is the antisense strand.

[0143] In other embodiments, the DsiRNA comprises:

5′-pXXXXXXXXXXXXXXXXXXXXXXXXX-3′
3′-YXXXXXXXXXXXXXXXXXXXXXXXXXp-5′

wherein “X”=RNA, “p”=a phosphate group, “X”=2′-O-methyl RNA, “Y” is an overhang domain comprised of 1-4 RNA monomers that are optionally 2′-O-methyl RNA monomers and underlined residues are 2′-O-methyl RNA monomers. The top strand is the sense strand, and the bottom strand is the antisense strand. In another related embodiment, the DsiRNA comprises:

5′-pXXXXXXXXXXXXXXXXXXXXXXXDD-3′
3′-YXXXXXXXXXXXXXXXXXXXXXXXXXp-5′

wherein “X”=RNA, “p”=a phosphate group, “X”=2′-O-methyl RNA, “Y” is an overhang domain comprised of 1-4 RNA monomers that are optionally 2′-O-methyl RNA monomers, underlined residues are 2′-O-methyl RNA monomers, and “D”=DNA. The top strand is the sense strand, and the bottom strand is the antisense strand. In another related embodiment, the DsiRNA comprises:

5′-pXXXXXXXXXXXXXXXXXXXXXXXXX-3′
3′-XXXXXXXXXXXXXXXXXXXXXXXXXXXp-5′

wherein “X”=RNA, “p”=a phosphate group and “X”=2′-O-methyl RNA. The top strand is the sense strand, and the bottom strand is the antisense strand. In a further related embodiment, the DsiRNA comprises:

5′-pXXXXXXXXXXXXXXXXXXXXXXXDD-3′
3′-XXXXXXXXXXXXXXXXXXXXXXXXXXXp-5′

wherein “X”=RNA, “p”=a phosphate group, “X”=2′-O-methyl RNA, and “D”=DNA. The top strand is the sense strand, and the bottom strand is the antisense strand.

[0144] In further embodiments, the DsiRNA comprises:

5′-pXXXXXXXXXXXXXXXXXXXXXXXXX-3′
3′-YXXXXXXXXXXXXXXXXXXXXXXXXXp-5′

wherein “X”=RNA, “p”=a phosphate group, “X”=2′-O-methyl RNA, “Y” is an overhang domain comprised of 1-4 RNA monomers that are optionally 2′-O-methyl RNA monomers and underlined residues are 2′-O-methyl RNA monomers. The top strand is the sense strand, and the bottom strand is the antisense strand. In one related embodiment, the DsiRNA comprises:

5′-pXXXXXXXXXXXXXXXXXXXXXXXDD-3′
3′-YXXXXXXXXXXXXXXXXXXXXXXXXXp-5′

wherein “X”=RNA, “p”=a phosphate group, “X”=2′-O-methyl RNA, “Y” is an overhang domain comprised of 1-4 RNA monomers that are optionally 2′-O-methyl RNA monomers, underlined residues are 2′-O-methyl RNA monomers, and “D”=DNA. The top strand is the sense strand, and the bottom strand is the antisense strand. In another related embodiment, the DsiRNA comprises:

5′-pXXXXXXXXXXXXXXXXXXXXXXXXX-3′
3′-XXXXXXXXXXXXXXXXXXXXXXXXXXXp-5′

wherein “X”=RNA, “p”=a phosphate group and “X”=2′-O-methyl RNA. The top strand is the sense strand, and the bottom strand is the antisense strand. In a further related embodiment, the DsiRNA comprises:

5′-pXXXXXXXXXXXXXXXXXXXXXXXDD-3′
3′-XXXXXXXXXXXXXXXXXXXXXXXXXXXp-5′

wherein “X”=RNA, “p”=a phosphate group, “X”=2′-O-methyl RNA, and “D”=DNA. The top strand is the sense strand, and the bottom strand is the antisense strand.

[0145] In additional embodiments, the DsiRNA comprises:

5′-pXXXXXXXXXXXXXXXXXXXXXXXXX-3′
3′-YXXXXXXXXXXXXXXXXXXXXXXXXXp-5′

wherein “X”=RNA, “p”=a phosphate group, “X”=2′-O-methyl RNA, “Y” is an overhang domain comprised of 1-4 RNA monomers that are optionally 2′-O-methyl RNA monomers and underlined residues are 2′-O-methyl RNA monomers. The top strand is the sense strand, and the bottom strand is the antisense strand. In one related embodiment, the DsiRNA comprises:

5′-pXXXXXXXXXXXXXXXXXXXXXXXDD-3′
3′-YXXXXXXXXXXXXXXXXXXXXXXXXXp-5′

wherein “X”=RNA, “p”=a phosphate group, “X”=2′-O-methyl RNA, “Y” is an overhang domain comprised of 1-4 RNA monomers that are optionally 2′-O-methyl RNA monomers, underlined residues are 2′-O-methyl RNA monomers, and “D”=DNA. The top strand is the sense strand, and the bottom strand is the antisense strand. In another related embodiment, the DsiRNA comprises:

5′-pXXXXXXXXXXXXXXXXXXXXXXXXX-3′
3′-XXXXXXXXXXXXXXXXXXXXXXXXXXXp-5′

wherein “X”=RNA, “p”=a phosphate group and “X”=2′-O-methyl RNA. The top strand is the sense strand, and the bottom strand is the antisense strand. In a further related embodiment, the

5′-pXXXXXXXXXXXXXXXXXXXXXXXDD-3′
3′-XXXXXXXXXXXXXXXXXXXXXXXXXXXp-5′

wherein “X”=RNA, “p”=a phosphate group, “X”=2′-O-methyl RNA, and “D”=DNA. The top strand is the sense strand, and the bottom strand is the antisense strand.

[0146] In further embodiments, the DsiRNA comprises:

5′-pXXXXXXXXXXXXXXXXXXXXXXXXX-3′
3′-YXXXXXXXXXXXXXXXXXXXXXXXXXp-5′

wherein “X”=RNA, “p”=a phosphate group, “X”=2′-O-methyl RNA, “Y” is an overhang domain comprised of 1-4 RNA monomers that are optionally 2′-O-methyl RNA monomers and underlined residues are 2′-O-methyl RNA monomers. The top strand is the sense strand, and the bottom strand is the antisense strand. In a related embodiment, the DsiRNA comprises:

5′-pXXXXXXXXXXXXXXXXXXXXXXXDD-3′
3′-YXXXXXXXXXXXXXXXXXXXXXXXXXp-5′

wherein “X”=RNA, “p”=a phosphate group, “X”=2′-O-methyl RNA, “Y” is an overhang domain comprised of 1-4 RNA monomers that are optionally 2′-O-methyl RNA monomers, underlined residues are 2′-O-methyl RNA monomers, and “D”=DNA. The top strand is the sense strand, and the bottom strand is the antisense strand. In another related embodiment, the DsiRNA comprises:

5′-pXXXXXXXXXXXXXXXXXXXXXXXXX-3′
3′-XXXXXXXXXXXXXXXXXXXXXXXXXXXp-5′

wherein “X”=RNA, “p”=a phosphate group and “X”=2′-O-methyl RNA. The top strand is the sense strand, and the bottom strand is the antisense strand. In a further related embodiment, the DsiRNA comprises:

5′-pXXXXXXXXXXXXXXXXXXXXXXXDD-3′
3′-XXXXXXXXXXXXXXXXXXXXXXXXXXXp-5′

wherein “X”=RNA, “p”=a phosphate group, “X”=2′-O-methyl RNA, and “D”=DNA. The top strand is the sense strand, and the bottom strand is the antisense strand.

[0147] In additional embodiments, the DsiRNA comprises:

5′-pXXXXXXXXXXXXXXXXXXXXXXXXX-3′
3′-YXXXXXXXXXXXXXXXXXXXXXXXXXp-5′

wherein “X”=RNA, “p”=a phosphate group, “X”=2′-O-methyl RNA, “Y” is an overhang domain comprised of 1-4 RNA monomers that are optionally 2′-O-methyl RNA monomers and underlined residues are 2′-O-methyl RNA monomers. The top strand is the sense strand, and the bottom strand is the antisense strand. In one related embodiment, the DsiRNA comprises:

5′-pXXXXXXXXXXXXXXXXXXXXXXXDD-3′
3′-YXXXXXXXXXXXXXXXXXXXXXXXXXp-5′

wherein “X”=RNA, “p”=a phosphate group, “X”=2′-O-methyl RNA, “Y” is an overhang domain comprised of 1-4 RNA monomers that are optionally 2′-O-methyl RNA monomers, underlined residues are 2′-O-methyl RNA monomers, and “D”=DNA. The top strand is the sense strand, and the bottom strand is the antisense strand. In another related embodiment, the DsiRNA comprises:

5′-pXXXXXXXXXXXXXXXXXXXXXXXXX-3′
3′-XXXXXXXXXXXXXXXXXXXXXXXXXXXp-5′

wherein “X”=RNA, “p”=a phosphate group and “X”=2′-O-methyl RNA. The top strand is the sense strand, and the bottom strand is the antisense strand. In a further related embodiment, the DsiRNA comprises:

5′-pXXXXXXXXXXXXXXXXXXXXXXXDD-3′
3′-XXXXXXXXXXXXXXXXXXXXXXXXXXXp-5′

wherein “X”=RNA, “p”=a phosphate group, “X”=2′-O-methyl RNA, and “D”=DNA. The top strand is the sense strand, and the bottom strand is the antisense strand.

[0148] In further embodiments, the DsiRNA comprises:

5′-pXXXXXXXXXXXXXXXXXXXXXXXXX-3′
3′-YXXXXXXXXXXXXXXXXXXXXXXXXXp-5′

wherein “X”=RNA, “p”=a phosphate group, “X”=2′-O-methyl RNA, “Y” is an overhang domain comprised of 1-4 RNA monomers that are optionally 2′-O-methyl RNA monomers and underlined residues are 2′-O-methyl RNA monomers. The top strand is the sense strand, and the bottom strand is the antisense strand. In one related embodiment, the DsiRNA comprises:

5′-pXXXXXXXXXXXXXXXXXXXXXXXDD-3′
3′-YXXXXXXXXXXXXXXXXXXXXXXXXXp-5′

wherein “X”=RNA, “p”=a phosphate group, “X”=2′-O-methyl RNA, “Y” is an overhang domain comprised of 1-4 RNA monomers that are optionally 2′-O-methyl RNA monomers, underlined residues are 2′-O-methyl RNA monomers, and “D”=DNA. The top strand is the sense strand, and the bottom strand is the antisense strand. In another related embodiment, the DsiRNA comprises:

5′-pXXXXXXXXXXXXXXXXXXXXXXXXX-3′
3′-XXXXXXXXXXXXXXXXXXXXXXXXXXXp-5′

wherein “X”=RNA, “p”=a phosphate group and “X”=2′-O-methyl RNA. The top strand is the sense strand, and the bottom strand is the antisense strand. In a further related embodiment, the DsiRNA comprises:

5′-pXXXXXXXXXXXXXXXXXXXXXXXDD-3′
3′-XXXXXXXXXXXXXXXXXXXXXXXXXXXp-5′

wherein “X”=RNA, “p”=a phosphate group, “X”=2′-O-methyl RNA, and “D”=DNA. The top strand is the sense strand, and the bottom strand is the antisense strand.

[0149] In additional embodiments, the DsiRNA comprises:

5′-pXXXXXXXXXXXXXXXXXXXXXXXXX-3′
3′-YXXXXXXXXXXXXXXXXXXXXXXXXXp-5′

wherein “X”=RNA, “p”=a phosphate group, “X”=2′-O-methyl RNA, “Y” is an overhang domain comprised of 1-4 RNA monomers that are optionally 2′-O-methyl RNA monomers and underlined residues are 2′-O-methyl RNA monomers. The top strand is the sense strand, and the bottom strand is the antisense strand. In one related embodiment, the DsiRNA comprises:

5′-pXXXXXXXXXXXXXXXXXXXXXXXDD-3′
3′-YXXXXXXXXXXXXXXXXXXXXXXXXXp-5′

wherein “X”=RNA, “p”=a phosphate group, “X”=2′-O-methyl RNA, “Y” is an overhang domain comprised of 1-4 RNA monomers that are optionally 2′-O-methyl RNA monomers, underlined residues are 2′-O-methyl RNA monomers, and “D”=DNA. The top strand is the sense strand, and the bottom strand is the antisense strand. In another related embodiment, the DsiRNA comprises:

5′-pXXXXXXXXXXXXXXXXXXXXXXXXX-3′
3′-XXXXXXXXXXXXXXXXXXXXXXXXXXXp-5′

wherein “X”=RNA, “p”=a phosphate group and “X”=2′-O-methyl RNA. The top strand is the sense strand, and the bottom strand is the antisense strand. In a further related embodiment, the

5′-pXXXXXXXXXXXXXXXXXXXXXXXDD-3′
3′-XXXXXXXXXXXXXXXXXXXXXXXXXXXp-5′

wherein “X”=RNA, “p”=a phosphate group, “X”=2′-O-methyl RNA, and “D”=DNA. The top strand is the sense strand, and the bottom strand is the antisense strand.

[0150] In further embodiments, the DsiRNA comprises:

5′-pXXXXXXXXXXXXXXXXXXXXXXXXX-3′
3′-YXXXXXXXXXXXXXXXXXXXXXXXXXp-5′

wherein “X”=RNA, “p”=a phosphate group, “X”=2′-O-methyl RNA, “Y” is an overhang domain comprised of 1-4 RNA monomers that are optionally 2′-O-methyl RNA monomers and underlined residues are 2′-O-methyl RNA monomers. The top strand is the sense strand, and the bottom strand is the antisense strand. In one related embodiment, the DsiRNA comprises:

5′-pXXXXXXXXXXXXXXXXXXXXXXXDD-3′
3′-YXXXXXXXXXXXXXXXXXXXXXXXXXp-5′

wherein “X”=RNA, “p”=a phosphate group, “X”=2′-O-methyl RNA, “Y” is an overhang domain comprised of 1-4 RNA monomers that are optionally 2′-O-methyl RNA monomers, underlined residues are 2′-O-methyl RNA monomers, and “D”=DNA. The top strand is the sense strand, and the bottom strand is the antisense strand. In another related embodiment, the DsiRNA comprises:

5′-pXXXXXXXXXXXXXXXXXXXXXXXXX-3′
3′-XXXXXXXXXXXXXXXXXXXXXXXXXXXp-5′

wherein “X”=RNA, “p”=a phosphate group and “X”=2′-O-methyl RNA. The top strand is the sense strand, and the bottom strand is the antisense strand. In a further related embodiment, the DsiRNA comprises:

5′-pXXXXXXXXXXXXXXXXXXXXXXXDD-3′
3′-XXXXXXXXXXXXXXXXXXXXXXXXXXXp-5′

wherein “X”=RNA, “p”=a phosphate group, “X”=2′-O-methyl RNA, and “D”=DNA. The top strand is the sense strand, and the bottom strand is the antisense strand.

[0151] The above modification patterns can also be incorporated into, e.g., the extended DsiRNA structures and mismatch and/or frayed DsiRNA structures described below.

[0152] In another embodiment, the DsiRNA comprises strands having equal lengths possessing 1-3 mismatched residues that serve to orient Dicer cleavage (specifically, one or more of positions 1, 2 or 3 on the first strand of the DsiRNA, when numbering from the 3′-terminal residue, are mismatched with corresponding residues of the 5′-terminal region on the second strand when first and second strands are annealed to one another). An exemplary 27mer DsiRNA agent with two terminal mismatched residues is shown:

[chemical structure]

wherein “X”=RNA, “p”=a phosphate group, “M”=Nucleic acid residues (RNA, DNA or non-natural or modified nucleic acids) that do not base pair (hydrogen bond) with corresponding “M” residues of otherwise complementary strand when strands are annealed. Any of the residues of such agents can optionally be 2′-O-methyl RNA monomers—alternating positioning of 2′-O-methyl RNA monomers that commences from the 3′-terminal residue of the bottom (second) strand, as shown for above asymmetric agents, can also be used in the above “blunt/fray” DsiRNA agent. In one embodiment, the top strand is the sense strand, and the bottom strand is the antisense strand. Alternatively, the bottom strand is the sense strand and the top strand is the antisense strand.

[0153] In certain additional embodiments, the present invention provides compositions for RNA interference (RNAi) that possess one or more base paired deoxyribonucleotides within a region of a double stranded ribonucleic acid (dsRNA) that is positioned 3′ of a projected sense strand Dicer cleavage site and correspondingly 5′ of a projected antisense strand Dicer cleavage site. The compositions of the invention comprise a dsRNA which is a precursor molecule, i.e., the dsRNA of the present invention is processed in vivo to produce an active small interfering nucleic acid (siRNA). The dsRNA is processed by Dicer to an active siRNA which is incorporated into RISC.

[0154] In certain embodiments, the DsiRNA agents of the invention can have the following exemplary structures (noting that any of the following exemplary structures can be combined, e.g., with the bottom strand modification patterns of the above-described structures—in one specific example, the bottom strand modification pattern shown in any of the above structures is applied to the 27 most 3′ residues of the bottom strand of any of the following structures; in another specific example, the bottom strand modification pattern shown in any of the above structures upon the 23 most 3′ residues of the bottom strand is applied to the 23 most 3′ residues of the bottom strand of any of the following structures):

[0155] In one such embodiment, the DsiRNA comprises the following (an exemplary “right-extended”, “DNA extended” DsiRNA):

5′-XXXXXXXXXXXXXXXXXXXXXXXX_{N*}D_{N}DD-3′
3′-YXXXXXXXXXXXXXXXXXXXXXXXX_{N*}D_{N}XX-5′

wherein “X”=RNA, “Y” is an optional overhang domain comprised of 0-10 RNA monomers that are optionally 2′-O-methyl RNA monomers—in certain embodiments, “Y” is an overhang domain comprised of 1-4 RNA monomers that are optionally 2′-O-methyl RNA monomers, “D”=DNA, and “N”=1 to 50 or more, but is optionally 1-8 or 1-10. “N*”=0 to 15 or more, but is optionally 0, 1, 2, 3, 4, 5 or 6. In one embodiment, the top strand is the sense strand, and the bottom strand is the antisense strand. Alternatively, the bottom strand is the sense strand and the top strand is the antisense strand.

[0156] In a related embodiment, the DsiRNA comprises:

5′-XXXXXXXXXXXXXXXXXXXXXXXX_{N*}D_{N}DD-3′
3′-YXXXXXXXXXXXXXXXXXXXXXXXX_{N*}D_{N}DD-5′

wherein “X”=RNA, “Y” is an optional overhang domain comprised of 0-10 RNA monomers that are optionally 2′-O-methyl RNA monomers—in certain embodiments, “Y” is an overhang domain comprised of 1-4 RNA monomers that are optionally 2′-O-methyl RNA monomers, “D”=DNA, and “N”=1 to 50 or more, but is optionally 1-8 or 1-10. “N*”=0 to 15 or more, but is optionally 0, 1, 2, 3, 4, 5 or 6. In one embodiment, the top strand is the sense strand, and the bottom strand is the antisense strand. Alternatively, the bottom strand is the sense strand and the top strand is the antisense strand.

[0157] In an additional embodiment, the DsiRNA comprises:

5′-XXXXXXXXXXXXXXXXXXXXXXXX_{N*}D_{N}DD-3′
3′-YXXXXXXXXXXXXXXXXXXXXXXXX_{N*}D_{N}ZZ-5′

wherein “X”=RNA, “X”=2′-O-methyl RNA, “Y” is an optional overhang domain comprised of 0-10 RNA monomers that are optionally 2′-O-methyl RNA monomers—in certain embodiments, “Y” is an overhang domain comprised of 1-4 RNA monomers that are optionally 2′-O-methyl RNA monomers, “D”=DNA, “Z”=DNA or RNA, and “N”=1 to 50 or more, but is optionally 1-8 or 1-10. “N*”=0 to 15 or more, but is optionally 0, 1, 2, 3, 4, 5 or 6. In one embodiment, the top strand is the sense strand, and the bottom strand is the antisense strand. Alternatively, the bottom strand is the sense strand and the top strand is the antisense strand, with 2′-O-methyl RNA monomers located at alternating residues along the top strand, rather than the bottom strand presently depicted in the above schematic.

[0158] In another such embodiment, the DsiRNA comprises:

5′-XXXXXXXXXXXXXXXXXXXXXXXX_{N*}D_{N}DD-3′
3′-YXXXXXXXXXXXXXXXXXXXXXXXX_{N*}D_{N}ZZ-5′

wherein “X”=RNA, “X”=2′-O-methyl RNA, “Y” is an optional overhang domain comprised of 0-10 RNA monomers that are optionally 2′-O-methyl RNA monomers—in certain embodiments, “Y” is an overhang domain comprised of 1-4 RNA monomers that are optionally 2′-O-methyl RNA monomers, “D”=DNA, “Z”=DNA or RNA, and “N”=1 to 50 or more, but is optionally 1-8 or 1-10. “N*”=0 to 15 or more, but is optionally 0, 1, 2, 3, 4, 5 or 6. In one embodiment, the top strand is the sense strand, and the bottom strand is the antisense strand. Alternatively, the bottom strand is the sense strand and the top strand is the antisense strand, with 2′-O-methyl RNA monomers located at alternating residues along the top strand, rather than the bottom strand presently depicted in the above schematic.

[0159] In another such embodiment, the DsiRNA comprises:

5′-XXXXXXXXXXXXXXXXXXXXXXXX_{N*}DNDD-3′
3′-YXXXXXXXXXXXXXXXXXXXXXXXX_{N}D_{N}ZZ-5′

wherein “X”=RNA, “X”=2′-O-methyl RNA, “Y” is an optional overhang domain comprised of 0-10 RNA monomers that are optionally 2′-O-methyl RNA monomers—in certain embodiments, “Y” is an overhang domain comprised of 1-4 RNA monomers that are optionally 2′-O-methyl RNA monomers, “D”=DNA, “Z”=DNA or RNA, and “N”=1 to 50 or more, but is optionally 1-8 or 1-10. “N*”=0 to 15 or more, but is optionally 0, 1, 2, 3, 4, 5 or 6. In one embodiment, the top strand is the sense strand, and the bottom strand is the antisense strand. Alternatively, the bottom strand is the sense strand and the top strand is the antisense strand, with 2′-O-methyl RNA monomers located at alternating residues along the top strand, rather than the bottom strand presently depicted in the above schematic.

[0160] In another embodiment, the DsiRNA comprises:

5′-XXXXXXXXXXXXXXXXXXXXXXXX_{N*}[X1/D1]_{N}DD-3′
3′-YXXXXXXXXXXXXXXXXXXXXXXXX_{N*}[X2/D2]_{N}ZZ-5′

wherein “X”=RNA, “Y” is an optional overhang domain comprised of 0-10 RNA monomers that are optionally 2′-O-methyl RNA monomers—in certain embodiments, “Y” is an overhang domain comprised of 1-4 RNA monomers that are optionally 2′-O-methyl RNA monomers, “D”=DNA, “Z”=DNA or RNA, and “N”=1 to 50 or more, but is optionally 1-8 or 1-10, where at least one D1_{N} is present in the top strand and is base paired with a corresponding D2_{N} in the bottom strand. Optionally, D1_{N} and D1_{N+1} are base paired with corresponding D2_{N} and D2_{N+1}; D1_{N}, D1_{N+1} and D1_{N+2} are base paired with corresponding D2_{N}, D1 _{N+1} and D1 _{N+2}, etc. “N*”=0 to 15 or more, but is optionally 0, 1, 2, 3, 4, 5 or 6. In one embodiment, the top strand is the sense strand, and the bottom strand is the antisense strand. Alternatively, the bottom strand is the sense strand and the top strand is the antisense strand, with 2′-O-methyl RNA monomers located at alternating residues along the top strand, rather than the bottom strand presently depicted in the above schematic.

[0161] In the structures depicted herein, the 5′ end of either the sense strand or antisense strand can optionally comprise a phosphate group.

[0162] In another embodiment, the DNA:DNA-extended DsiRNA comprises strands having equal lengths possessing 1-3 mismatched residues that serve to orient Dicer cleavage (specifically, one or more of positions 1, 2 or 3 on the first strand of the DsiRNA, when numbering from the 3′-terminal residue, are mismatched with corresponding residues of the 5′-terminal region on the second strand when first and second strands are annealed to one another). An exemplary DNA:DNA-extended DsiRNA agent with two terminal mismatched residues is shown:

[chemical structure]

wherein “X”=RNA, “M”=Nucleic acid residues (RNA, DNA or non-natural or modified nucleic acids) that do not base pair (hydrogen bond) with corresponding “M” residues of otherwise complementary strand when strands are annealed, “D”=DNA and “N”=1 to 50 or more, but is optionally 1-8 or 1-10. “N*”=0 to 15 or more, but is optionally 0, 1, 2, 3, 4, 5 or 6. Any of the residues of such agents can optionally be 2′-O-methyl RNA monomers—alternating positioning of 2′-O-methyl RNA monomers that commences from the 3′-terminal residue of the bottom (second) strand, as shown for above asymmetric agents, can also be used in the above “blunt/fray” DsiRNA agent. In one embodiment, the top strand (first strand) is the sense strand, and the bottom strand (second strand) is the antisense strand. Alternatively, the bottom strand is the sense strand and the top strand is the antisense strand. Modification and DNA:DNA extension patterns paralleling those shown above for asymmetric/overhang agents can also be incorporated into such “blunt/frayed” agents.

[0163] In one embodiment, a length-extended DsiRNA agent is provided that comprises deoxyribonucleotides positioned at sites modeled to function via specific direction of Dicer cleavage, yet which does not require the presence of a base-paired deoxyribonucleotide in the dsRNA structure. An exemplary structure for such a molecule is shown:

5′-XXXXXXXXXXXXXXXXXXXDDXX-3′
3′-YXXXXXXXXXXXXXXXXXDDXXXX-5′

wherein “X”=RNA, “Y” is an optional overhang domain comprised of 0-10 RNA monomers that are optionally 2′-O-methyl RNA monomers—in certain embodiments, “Y” is an overhang domain comprised of 1-4 RNA monomers that are optionally 2′-O-methyl RNA monomers, and “D”=DNA. In one embodiment, the top strand is the sense strand, and the bottom strand is the antisense strand. Alternatively, the bottom strand is the sense strand and the top strand is the antisense strand. The above structure is modeled to force Dicer to cleave a minimum of a 21mer duplex as its primary post-processing form. In embodiments where the bottom strand of the above structure is the antisense strand, the positioning of two deoxyribonucleotide residues at the ultimate and penultimate residues of the 5′ end of the antisense strand is likely to reduce off-target effects (as prior studies have shown a 2′-O-methyl modification of at least the penultimate position from the 5′ terminus of the antisense strand to reduce off-target effects; see, e.g., US 2007/0223427).

[0164] In one embodiment, the DsiRNA comprises the following (an exemplary “left-extended”, “DNA extended” DsiRNA):

5′-D_{N}XXXXXXXXXXXXXXXXXXXXXXXX_{N*}Y-3′
3′-D_{N}XXXXXXXXXXXXXXXXXXXXXXXX_{N*}-5*

wherein “X”=RNA, “Y” is an optional overhang domain comprised of 0-10 RNA monomers that are optionally 2′-O-methyl RNA monomers—in certain embodiments, “Y” is an overhang domain comprised of 1-4 RNA monomers that are optionally 2′-O-methyl RNA monomers, “D”=DNA, and “N”=1 to 50 or more, but is optionally 1-8 or 1-10. “N*”=0 to 15 or more, but is optionally 0, 1, 2, 3, 4, 5 or 6. In one embodiment, the top strand is the sense strand, and the bottom strand is the antisense strand. Alternatively, the bottom strand is the sense strand and the top strand is the antisense strand.

[0165] In a related embodiment, the DsiRNA comprises:

5′-D_{N}XXXXXXXXXXXXXXXXXXXXXXXX_{N*}DD-3′
3′-D_{N}XXXXXXXXXXXXXXXXXXXXXXXX_{N*}XX-5*

wherein “X”=RNA, optionally a 2′-O-methyl RNA monomers “D”=DNA, “N”=1 to 50 or more, but is optionally 1-8 or 1-10. “N*”=0 to 15 or more, but is optionally 0, 1, 2, 3, 4, 5 or 6. In one embodiment, the top strand is the sense strand, and the bottom strand is the antisense strand. Alternatively, the bottom strand is the sense strand and the top strand is the antisense strand.

[0166] In an additional embodiment, the DsiRNA comprises:

5′-D_{N}XXXXXXXXXXXXXXXXXXXXXXXX_{N*}DD-3′
3′-D_{N}XXXXXXXXXXXXXXXXXXXXXXXX_{N*}ZZ-5′

wherein “X”=RNA, optionally a 2′-O-methyl RNA monomers “D”=DNA, “N”=1 to 50 or more, but is optionally 1-8 or 1-10. “N*”=0 to 15 or more, but is optionally 0, 1, 2, 3, 4, 5 or 6. “Z”=DNA or RNA. In one embodiment, the top strand is the sense strand, and the bottom strand is the antisense strand. Alternatively, the bottom strand is the sense strand and the top strand is the antisense strand, with 2′-O-methyl RNA monomers located at alternating residues along the top strand, rather than the bottom strand presently depicted in the above schematic.

[0167] In another such embodiment, the DsiRNA comprises:

5′-D_{N}XXXXXXXXXXXXXXXXXXXXXXXX_{N*}DD-3′
3′-D_{N}XXXXXXXXXXXXXXXXXXXXXXXX_{N*}ZZ-5′

wherein “X”=RNA, optionally a 2′-O-methyl RNA monomers “D”=DNA, “N”=1 to 50 or more, but is optionally 1-8 or 1-10. “N*”=0 to 15 or more, but is optionally 0, 1, 2, 3, 4, 5 or 6. “Z”=DNA or RNA. In one embodiment, the top strand is the sense strand, and the bottom strand is the antisense strand. Alternatively, the bottom strand is the sense strand and the top strand is the antisense strand, with 2′-O-methyl RNA monomers located at alternating residues along the top strand, rather than the bottom strand presently depicted in the above schematic.

[0168] In another such embodiment, the DsiRNA comprises:

5′-D_{N}ZZXXXXXXXXXXXXXXXXXXXXXXXX_{N*}DD-3′
3′-D_{N}XXXXXXXXXXXXXXXXXXXXXXXXXX_{N*}ZZ-5′

wherein “X”=RNA, “X”=2′-O-methyl RNA, “D”=DNA, “Z”=DNA or RNA, and “N”=1 to 50 or more, but is optionally 1-8 or 1-10. “N*”=0 to 15 or more, but is optionally 0, 1, 2, 3, 4, 5 or 6. In one embodiment, the top strand is the sense strand, and the bottom strand is the antisense strand. Alternatively, the bottom strand is the sense strand and the top strand is the antisense strand, with 2′-O-methyl RNA monomers located at alternating residues along the top strand, rather than the bottom strand presently depicted in the above schematic.

[0169] In another such embodiment, the DsiRNA comprises:

5′-D_{N}ZZXXXXXXXXXXXXXXXXXXXXXXXX_{N*}Y-3′
3′-D_{N}XXXXXXXXXXXXXXXXXXXXXXXXXX_{N*}-5′

wherein “X”=RNA, “X”=2′-O-methyl RNA, “D”=DNA, “Z”=DNA or RNA, and “N”=1 to 50 or more, but is optionally 1-8 or 1-10. “N*”=0 to 15 or more, but is optionally 0, 1, 2, 3, 4, 5 or 6. “Y” is an optional overhang domain comprised of 0-10 RNA monomers that are optionally 2′-O-methyl RNA monomers—in certain embodiments, “Y” is an overhang domain comprised of 1-4 RNA monomers that are optionally 2′-O-methyl RNA monomers. In one embodiment, the top strand is the sense strand, and the bottom strand is the antisense strand. Alternatively, the bottom strand is the sense strand and the top strand is the antisense strand, with 2′-O-methyl RNA monomers located at alternating residues along the top strand, rather than the bottom strand presently depicted in the above schematic.

[0170] In another embodiment, the DsiRNA comprises:

5′-[X1/D1]_{N}XXXXXXXXXXXXXXXXXXXXXXXX_{N*}DD-3′
3′-[X2/D2]_{N}XXXXXXXXXXXXXXXXXXXXXXXX_{N*}ZZ-5′

wherein “X”=RNA, “D”=DNA, “Z”=DNA or RNA, and “N”=1 to 50 or more, but is optionally 1-8 or 1-10, where at least one D1_{N} is present in the top strand and is base paired with a corresponding D2_{N} in the bottom strand. Optionally, D1_{N} and D1_{N+1} are base paired with corresponding D2_{N} and D2_{N+1}; D1_{N}, D1_{N+1} and D1_{N+2} are base paired with corresponding D2_{N}, D1_{N+1} and D1_{N+2}, etc. “N*”=0 to 15 or more, but is optionally 0, 1, 2, 3, 4, 5 or 6. In one embodiment, the top strand is the sense strand, and the bottom strand is the antisense strand. Alternatively, the bottom strand is the sense strand and the top strand is the antisense strand, with 2′-O-methyl RNA monomers located at alternating residues along the top strand, rather than the bottom strand presently depicted in the above schematic.

[0171] In a related embodiment, the DsiRNA comprises:

5′-[X1/D1]_{N}XXXXXXXXXXXXXXXXXXXXXXXX_{N*}Y-3′
3′-[X2/D2]_{N}XXXXXXXXXXXXXXXXXXXXXXXX_{N*}-5*

wherein “X”=RNA, “D”=DNA, “Y” is an optional overhang domain comprised of 0-10 RNA monomers that are optionally 2′-O-methyl RNA monomers—in certain embodiments, “Y” is an overhang domain comprised of 1-4 RNA monomers that are optionally 2′-O-methyl RNA monomers, and “N”=1 to 50 or more, but is optionally 1-8 or 1-10, where at least one D1_{N} is present in the top strand and is base paired with a corresponding D2_{N} in the bottom strand. Optionally, D1_{N} and D1_{N+1} are base paired with corresponding D2_{N} and D2_{N+1}; D1_{N}, D1_{N+1} and D1_{N+2} are base paired with corresponding D2_{N}, D1_{N+1} and D1_{N+2}, etc. “N*”=0 to 15 or more, but is optionally 0, 1, 2, 3, 4, 5 or 6. In one embodiment, the top strand is the sense strand, and the bottom strand is the antisense strand. Alternatively, the bottom strand is the sense strand and the top strand is the antisense strand, with 2′-O-methyl RNA monomers located at alternating residues along the top strand, rather than the bottom strand presently depicted in the above schematic.

[0172] In another embodiment, the DNA:DNA-extended DsiRNA comprises strands having equal lengths possessing 1-3 mismatched residues that serve to orient Dicer cleavage (specifically, one or more of positions 1, 2 or 3 on the first strand of the DsiRNA, when numbering from the 3′-terminal residue, are mismatched with corresponding residues of the 5′-terminal region on the second strand when first and second strands are annealed to one another). An exemplary DNA:DNA-extended DsiRNA agent with two terminal mismatched residues is shown:

[chemical structure]

wherein “X”=RNA, “M”=Nucleic acid residues (RNA, DNA or non-natural or modified nucleic acids) that do not base pair (hydrogen bond) with corresponding “M” residues of otherwise complementary strand when strands are annealed, “D”=DNA and “N”=1 to 50 or more, but is optionally 1-8 or 1-10. “N*”=0 to 15 or more, but is optionally 0, 1, 2, 3, 4, 5 or 6. Any of the residues of such agents can optionally be 2′-O-methyl RNA monomers—alternating positioning of 2′-O-methyl RNA monomers that commences from the 3′-terminal residue of the bottom (second) strand, as shown for above asymmetric agents, can also be used in the above “blunt/fray” DsiRNA agent. In one embodiment, the top strand (first strand) is the sense strand, and the bottom strand (second strand) is the antisense strand. Alternatively, the bottom strand is the sense strand and the top strand is the antisense strand. Modification and DNA:DNA extension patterns paralleling those shown above for asymmetric/overhang agents can also be incorporated into such “blunt/frayed” agents.

[0173] In another embodiment, a length-extended DsiRNA agent is provided that comprises deoxyribonucleotides positioned at sites modeled to function via specific direction of Dicer cleavage, yet which does not require the presence of a base-paired deoxyribonucleotide in the dsRNA structure. An exemplary structure for such a molecule is shown:

5′-XXDDXXXXXXXXXXXXXXXXXXXX_{N*}Y-3′
3′-DDXXXXXXXXXXXXXXXXXXXXXX_{N*}-5′

wherein “X”=RNA, “Y” is an optional overhang domain comprised of 0-10 RNA monomers that are optionally 2′-O-methyl RNA monomers—in certain embodiments, “Y” is an overhang domain comprised of 1-4 RNA monomers that are optionally 2′-O-methyl RNA monomers, and “D”=DNA. “N*”=0 to 15 or more, but is optionally 0, 1, 2, 3, 4, 5 or 6. In one embodiment, the top strand is the sense strand, and the bottom strand is the antisense strand. Alternatively, the bottom strand is the sense strand and the top strand is the antisense strand. The above structure is modeled to force Dicer to cleave a minimum of a 21mer duplex as its primary post-processing form. In embodiments where the bottom strand of the above structure is the antisense strand, the positioning of two deoxyribonucleotide residues at the ultimate and penultimate residues of the 5′ end of the antisense strand is likely to reduce off-target effects (as prior studies have shown a 2′-O-methyl modification of at least the penultimate position from the 5′ terminus of the antisense strand to reduce off-target effects; see, e.g., U.S. 2007/0223427).

[0174] In certain embodiments, the “D” residues of the above structures include at least one PS-DNA or PS-RNA. Optionally, the “D” residues of the above structures include at least one modified nucleotide that inhibits Dicer cleavage.

[0175] While the above-described “DNA-extended” DsiRNA agents can be categorized as either “left extended” or “right extended”, DsiRNA agents comprising both left- and right-extended DNA-containing sequences within a single agent (e.g., both flanks surrounding a core dsRNA structure are dsDNA extensions) can also be generated and used in similar manner to those described herein for “right-extended” and “left-extended” agents.

[0176] In some embodiments, the DsiRNA of the instant invention further comprises a linking moiety or domain that joins the sense and antisense strands of a DNA:DNA-extended DsiRNA agent. Optionally, such a linking moiety domain joins the 3′ end of the sense strand and the 5′ end of the antisense strand. The linking moiety may be a chemical (non-nucleotide) linker, such as an oligomethylenediol linker, oligoethylene glycol linker, or other art-recognized linker moiety. Alternatively, the linker can be a nucleotide linker, optionally including an extended loop and/or tetraloop.

[0177] In one embodiment, the DsiRNA agent has an asymmetric structure, with the sense strand having a 25-base pair length, and the antisense strand having a 27-base pair length with a 1-4 base 3′-overhang (e.g., a one base 3′-overhang, a two base 3′-overhang, a three base 3′-overhang or a four base 3′-overhang). In another embodiment, this DsiRNA agent has an asymmetric structure further containing 2 deoxynucleotides at the 3′ end of the sense strand.

[0178] In another embodiment, the DsiRNA agent has an asymmetric structure, with the antisense strand having a 25-base pair length, and the sense strand having a 27-base pair length with a 1-4 base 3′-overhang (e.g., a one base 3′-overhang, a two base 3′-overhang, a three base 3′-overhang or a four base 3′-overhang). In another embodiment, this DsiRNA agent has an asymmetric structure further containing 2 deoxynucleotides at the 3′ end of the antisense strand.

[0179] Exemplary KRAS targeting DsiRNA agents of the invention include the following:

[chemical structure]

[0180] Other exemplary KRAS targeting DsiRNA agents of the invention include the following:

Lengthy table referenced here
US20230111150A1-20230413-T00001
Please refer to the end of the specification for access instructions.

Lengthy table referenced here
US20230111150A1-20230413-T00002
Please refer to the end of the specification for access instructions.

Lengthy table referenced here
US20230111150A1-20230413-T00003
Please refer to the end of the specification for access instructions.

Lengthy table referenced here
US20230111150A1-20230413-T00004
Please refer to the end of the specification for access instructions.

Lengthy table referenced here
US20230111150A1-20230413-T00005
Please refer to the end of the specification for access instructions.

[0181] Projected 21mer target sequences for each DsiRNA are shown in Table 7.

TABLE 7
DsiRNA Target Sequences (21mers)

| | |
|---|---|
| KRAS-204 Target: | 5′-TAGTTGGAGCTGGTGGCGTAG-3′ |
| | (SEQ ID NO: 6843) |
| KRAS-204* Target: | 5′-TAGTTGGAGCTGTTGGCGTAG-3′ |
| | (SEQ ID NO: 6844) |
| KRAS-341 Target: | 5′-GATATTCTCGACACAGCAGGT-3′ |
| | (SEQ ID NO: 6845) |
| KRAS-341* Target: | 5′-GATATTCTCGACACAGCAGGT-3′ |
| | (SEQ ID NO: 6846) |
| KRAS-343 Target: | 5′-TATTCTCGACACAGCAGGTCA-3′ |
| | (SEQ ID NO: 6847) |
| KRAS-343* Target: | 5′-TATTCTCGACACAGCAGGTCA-3′ |
| | (SEQ ID NO: 6848) |
| KRAS-355 Target: | 5′-AGCAGGTCAAGAGGAGTACAG-3′ |
| | (SEQ ID NO: 6849) |
| KRAS-355* Target: | 5′-AGCAGGTCATGAGGAGTACAG-3′ |
| | (SEQ ID NO: 6850) |
| KRAS-361 Target: | 5′-TCAAGAGGAGTACAGTGCAAT-3′ |
| | (SEQ ID NO: 6851) |
| KRAS-361* Target: | 5′-TCATGAGGAGTACAGTGCAAT-3′ |
| | (SEQ ID NO: 6852) |
| KRAS-371 Target: | 5′-TACAGTGCAATGAGGGACCAG-3′ |
| | (SEQ ID NO: 6853) |
| KRAS-401 Target: | 5′-ACTGGGGAGGGCTTTCTTTGT-3′ |
| | (SEQ ID NO: 6854) |
| KRAS-404 Target: | 5′-GGGGAGGGCTTTCTTTGTGTA-3′ |
| | (SEQ ID NO: 6855) |
| KRAS-406 Target: | 5′-GGAGGGCTTTCTTTGTGTATT-3′ |
| | (SEQ ID NO: 6856) |
| KRAS-410 Target: | 5′-GGCTTTCTTTGTGTATTTGCC-3′ |
| | (SEQ ID NO: 6857) |
| KRAS-415 Target: | 5′-TCTTTGTGTATTTGCCATAAA-3′ |
| | (SEQ ID NO: 6858) |
| KRAS-416 Target: | 5′-CTTTGTGTATTTGCCATAAAT-3′ |
| | (SEQ ID NO: 6859) |
| KRAS-417 Target: | 5′-TTTGTGTATTTGCCATAAATA-3′ |
| | (SEQ ID NO: 6860) |
| KRAS-418 Target: | 5′-TTGTGTATTTGCCATAAATAA-3′ |
| | (SEQ ID NO: 6861) |
| KRAS-419 Target: | 5′-TGTGTATTTGCCATAAATAAT-3′ |
| | (SEQ ID NO: 6862) |
| KRAS-420 Target: | 5′-GTGTATTTGCCATAAATAATA-3′ |
| | (SEQ ID NO: 6863) |
| KRAS-429 Target: | 5′-CCATAAATAATACTAAATCAT-3′ |
| | (SEQ ID NO: 6864) |
| KRAS-434 Target: | 5′-AATAATACTAAATCATTTGAA-3′ |
| | (SEQ ID NO: 6865) |
| KRAS-438 Target: | 5′-ATACTAAATCATTTGAAGATA-3′ |
| | (SEQ ID NO: 6866) |
| KRAS-440 Target: | 5′-ACTAAATCATTTGAAGATATT-3′ |
| | (SEQ ID NO: 6867) |
| KRAS-445 Target: | 5′-ATCATTTGAAGATATTCACCA-3′ |
| | (SEQ ID NO: 6868) |
| KRAS-450 Target: | 5′-TTGAAGATATTCACCATTATA-3′ |
| | (SEQ ID NO: 6869) |
| KRAS-452 Target: | 5′-GAAGATATTCACCATTATAGA-3′ |
| | (SEQ ID NO: 6870) |
| KRAS-508 Target: | 5′-ACCTATGGTCCTAGTAGGAAA-3′ |
| | (SEQ ID NO: 6871) |
| KRAS-534 Target: | 5′-GTGATTTGCCTTCTAGAACAG-3′ |
| | (SEQ ID NO: 6872) |
| KRAS-760 Target: | 5′-TTGATGATGCCTTCTATACAT-3′ |
| | (SEQ ID NO: 6873) |
| KRAS-776 Target: | 5′-TACATTAGTTCGAGAAATTCG-3′ |
| | (SEQ ID NO: 6874) |
| KRAS-786 Target: | 5′-CGAGAAATTCGAAAACATAAA-3′ |
| | (SEQ ID NO: 6875) |
| KRAS-795 Target: | 5′-CGAAAACATAAAGAAAAGATG-3′ |
| | (SEQ ID NO: 6876) |
| KRAS-800 Target: | 5′-ACATAAAGAAAAGATGAGCAA-3′ |
| | (SEQ ID NO: 6877) |
| KRAS-800* Target: | 5′-ACATAAAGAAAAGATGAGCAA-3′ |
| | (SEQ ID NO: 6878) |
| KRAS-920 Target: | 5′-TTTTGTACATTACACTAAATT-3′ |
| | (SEQ ID NO: 6879) |
| KRAS-935 Target: | 5′-TAAATTATTAGCATTTGTTTT-3′ |
| | (SEQ ID NO: 6880) |
| KRAS-940 Target: | 5′-TATTAGCATTTGTTTTAGCAT-3′ |
| | (SEQ ID NO: 6881) |
| KRAS-1032 Target: | 5′-GAAGTTTTTTTTTCCTCTAAG-3′ |
| | (SEQ ID NO: 6882) |
| KRAS-1048 Target: | 5′-CTAAGTGCCAGTATTCCCAGA-3′ |
| | (SEQ ID NO: 6883) |
| KRAS-1188 Target: | 5′-TTGGTGTGAAACAAATTAATG-3′ |
| | (SEQ ID NO: 6884) |
| KRAS-1256 Target: | 5′-GGATTAATTACTAATTTCAGT-3′ |
| | (SEQ ID NO: 6885) |
| KRAS-1634 Target: | 5′-GCTATATTTACATGCTACTAA-3′ |
| | (SEQ ID NO: 6886) |
| KRAS-5134 Target: | 5′-ATTTTAACTATTTTTGTATAG-3′ |
| | (SEQ ID NO: 6887) |
| KRAS-5208 Target: | 5′-TGCAGTGTGATCCAGTTGTTT-3′ |
| | (SEQ ID NO: 6888) |
| KRAS-174 Target: | 5′-TGCTGAAAATGACTGAATATA-3′ |
| | (SEQ ID NO: 6889) |
| KRAS-180 Target: | 5′-AAATGACTGAATATAAACTTG-3′ |
| | (SEQ ID NO: 6890) |
| KRAS-184 Target: | 5′-GACTGAATATAAACTTGTGGT-3′ |
| | (SEQ ID NO: 6891) |
| KRAS-246 Target: | 5′-AGCTAATTCAGAATCATTTTG-3′ |
| | (SEQ ID NO: 6892) |
| KRAS-270 Target: | 5′-ACGAATATGATCCAACAATAG-3′ |
| | (SEQ ID NO: 6893) |
| KRAS-306 Target: | 5′-AGCAAGTAGTAATTGATGGAG-3′ |
| | (SEQ ID NO: 6894) |
| KRAS-406 Target: | 5′-GGAGGGCTTTCTTTGTGTATT-3′ |
| | (SEQ ID NO: 6895) |
| KRAS-415 Target: | 5′-TCTTTGTGTATTTGCCATAAA-3′ |
| | (SEQ ID NO: 6896) |
| KRAS-416 Target: | 5′-CTTTGTGTATTTGCCATAAAT-3′ |
| | (SEQ ID NO: 6897) |
| KRAS-417 Target: | 5′-TTTGTGTATTTGCCATAAATA-3′ |
| | (SEQ ID NO: 6898) |
| KRAS-418 Target: | 5′-TTGTGTATTTGCCATAAATAA-3′ |
| | (SEQ ID NO: 6899) |
| KRAS-422 Target: | 5′-GTATTTGCCATAAATAATACT-3′ |
| | (SEQ ID NO: 6900) |
| KRAS-423 Target: | 5′-TATTTGCCATAAATAATACTA-3′ |
| | (SEQ ID NO: 6901) |
| KRAS-429 Target: | 5′-CCATAAATAATACTAAATCAT-3′ |
| | (SEQ ID NO: 6902) |
| KRAS-430 Target: | 5′-CATAAATAATACTAAATCATT-3′ |
| | (SEQ ID NO: 6903) |
| KRAS-432 Target: | 5′-TAAATAATACTAAATCATTTG-3′ |
| | (SEQ ID NO: 6904) |
| KRAS-433 Target: | 5′-AAATAATACTAAATCATTTGA-3′ |
| | (SEQ ID NO: 6905) |
| KRAS-434 Target: | 5′-AATAATACTAAATCATTTGAA-3′ |
| | (SEQ ID NO: 6906) |
| KRAS-435 Target: | 5′-ATAATACTAAATCATTTGAAG-3′ |
| | (SEQ ID NO: 6907) |
| KRAS-448 Target: | 5′-ATTTGAAGATATTCACCATTA-3′ |
| | (SEQ ID NO: 6908) |
| KRAS-450 Target: | 5′-TTGAAGATATTCACCATTATA-3′ |
| | (SEQ ID NO: 6909) |
| KRAS-451 Target: | 5′-TGAAGATATTCACCATTATAG-3′ |
| | (SEQ ID NO: 6910) |
| KRAS-452 Target: | 5′-GAAGATATTCACCATTATAGA-3′ |
| | (SEQ ID NO: 6911) |
| KRAS-453 Target: | 5′-AAGATATTCACCATTATAGAG-3′ |
| | (SEQ ID NO: 6912) |
| KRAS-463 Target: | 5′-CCATTATAGAGAACAAATTAA-3′ |
| | (SEQ ID NO: 6913) |
| KRAS-465 Target: | 5′-ATTATAGAGAACAAATTAAAA-3′ |
| | (SEQ ID NO: 6914) |
| KRAS-466 Target: | 5′-TTATAGAGAACAAATTAAAAG-3′ |
| | (SEQ ID NO: 6915) |
| KRAS-467 Target: | 5′-TATAGAGAACAAATTAAAAGA-3′ |
| | (SEQ ID NO: 6916) |
| KRAS-468 Target: | 5′-ATAGAGAACAAATTAAAAGAG-3′ |
| | (SEQ ID NO: 6917) |
| KRAS-518 Target: | 5′-CTAGTAGGAAATAAATGTGAT-3′ |
| | (SEQ ID NO: 6918) |
| KRAS-519 Target: | 5′-TAGTAGGAAATAAATGTGATT-3′ |
| | (SEQ ID NO: 6919) |
| KRAS-583 Target: | 5′-AAGAAGTTATGGAATTCCTTT-3′ |
| | (SEQ ID NO: 6920) |
| KRAS-586 Target: | 5′-ACTAGTACAAGTGGTAATTTT-3′ |
| | (SEQ ID NO: 6 973) |
| KRAS-587 Target: | 5′-AGTTATGGAATTCCTTTTATT-3′ |
| | (SEQ ID NO: 6922) |
| KRAS-588 Target: | 5′-GTTATGGAATTCCTTTTATTG-3′ |
| | (SEQ ID NO: 6923) |
| KRAS-589 Target: | 5′-TTATGGAATTCCTTTTATTGA-3′ |
| | (SEQ ID NO: 6924) |
| KRAS-636 Target: | 5′-TGGAGGATGCTTTTTATACAT-3′ |
| | (SEQ ID NO: 6925) |
| KRAS-638 Target: | 5′-GAGGATGCTTTTTATACATTG-3′ |
| | (SEQ ID NO: 6926) |
| KRAS-678 Target: | 5′-ACAGATTGAAAAAAATCAGCA-3′ |
| | (SEQ ID NO: 6927) |
| KRAS-679 Target: | 5′-CAGATTGAAAAAAATCAGCAA-3′ |
| | (SEQ ID NO: 6928) |
| KRAS-681 Target: | 5′-GATTGAAAAAAATCAGCAAAG-3′ |
| | (SEQ ID NO: 6929) |
| KRAS-682 Target: | 5′-ATTGAAAAAAATCAGCAAAGA-3′ |
| | (SEQ ID NO: 6930) |
| KRAS-683 Target: | 5′-TTGAAAAAAATCAGCAAAGAA-3′ |
| | (SEQ ID NO: 6931) |
| KRAS-684 Target: | 5′-TGAAAAAAATCAGCAAAGAAG-3′ |
| | (SEQ ID NO: 6932) |
| KRAS-712 Target: | 5′-TCCTGGCTGTGTGAAAATTAA-3′ |
| | (SEQ ID NO: 6933) |
| KRAS-716 Target: | 5′-GGCTGTGTGAAAATTAAAAAA-3′ |
| | (SEQ ID NO: 6934) |
| KRAS-720 Target: | 5′-GTGTGAAAATTAAAAAATGCA-3′ |
| | (SEQ ID NO: 6935) |
| KRAS-721 Target: | 5′-TGTGAAAATTAAAAAATGCAT-3′ |
| | (SEQ ID NO: 6936) |
| KRAS-722 Target: | 5′-GTGAAAATTAAAAAATGCATT-3′ |
| | (SEQ ID NO: 6937) |
| KRAS-723 Target: | 5′-TGAAAATTAAAAAATGCATTA-3′ |
| | (SEQ ID NO: 6938) |
| KRAS-725 Target: | 5′-AAAATTAAAAAATGCATTATA-3′ |
| | (SEQ ID NO: 6939) |
| KRAS-726 Target: | 5′-AAATTAAAAAATGCATTATAA-3′ |
| | (SEQ ID NO: 6940) |
| KRAS-727 Target: | 5′-AATTAAAAAATGCATTATAAT-3′ |
| | (SEQ ID NO: 6941) |
| KRAS-728 Target: | 5′-ATTAAAAAATGCATTATAATG-3′ |
| | (SEQ ID NO: 6942) |
| KRAS-730 Target: | 5′-TAAAAAATGCATTATAATGTA-3′ |
| | (SEQ ID NO: 6943) |
| KRAS-737 Target: | 5′-TGCATTATAATGTAATCTGGG-3′ |
| | (SEQ ID NO: 6944) |
| KRAS-784 Target: | 5′-TTCGAGAAATTCGAAAACATA-3′ |
| | (SEQ ID NO: 6945) |
| KRAS-785 Target: | 5′-TCGAGAAATTCGAAAACATAA-3′ |
| | (SEQ ID NO: 6946) |
| KRAS-786 Target: | 5′-CGAGAAATTCGAAAACATAAA-3′ |
| | (SEQ ID NO: 6947) |
| KRAS-789 Target: | 5′-GAAATTCGAAAACATAAAGAA-3′ |
| | (SEQ ID NO: 6948) |
| KRAS-794 Target: | 5′-TCGAAAACATAAAGAAAAGAT-3′ |
| | (SEQ ID NO: 6949) |
| KRAS-795 Target: | 5′-CGAAAACATAAAGAAAAGATG-3′ |
| | (SEQ ID NO: 6950) |
| KRAS-819 Target: | 5′-AAAGATGGTAAAAAGAAGAAA-3′ |
| | (SEQ ID NO: 6951) |
| KRAS-820 Target: | 5′-AAGATGGTAAAAAGAAGAAAA-3′ |
| | (SEQ ID NO: 6952) |
| KRAS-822 Target: | 5′-GATGGTAAAAAGAAGAAAAAG-3′ |
| | (SEQ ID NO: 6953) |
| KRAS-823 Target: | 5′-ATGGTAAAAAGAAGAAAAAGA-3′ |
| | (SEQ ID NO: 6954) |
| KRAS-828 Target: | 5′-AAAAAGAAGAAAAAGAAGTCA-3′ |
| | (SEQ ID NO: 6955) |
| KRAS-829 Target: | 5′-AAAAGAAGAAAAAGAAGTCAA-3′ |
| | (SEQ ID NO: 6956) |
| KRAS-830 Target: | 5′-AAAGAAGAAAAAGAAGTCAAA-3′ |
| | (SEQ ID NO: 6957) |
| KRAS-846 Target: | 5′-TCAAAGACAAAGTGTGTAATT-3′ |
| | (SEQ ID NO: 6958) |
| KRAS-847 Target: | 5′-CAAAGACAAAGTGTGTAATTA-3′ |
| | (SEQ ID NO: 6959) |
| KRAS-851 Target: | 5′-GACAAAGTGTGTAATTATGTA-3′ |
| | (SEQ ID NO: 6960) |
| KRAS-853 Target: | 5′-CAAAGTGTGTAATTATGTAAA-3′ |
| | (SEQ ID NO: 6961) |
| KRAS-857 Target: | 5′-GTGTGTAATTATGTAAATACA-3′ |
| | (SEQ ID NO: 6962) |
| KRAS-859 Target: | 5′-GTGTAATTATGTAAATACAAT-3′ |
| | (SEQ ID NO: 6963) |
| KRAS-861 Target: | 5′-GTAATTATGTAAATACAATTT-3′ |
| | (SEQ ID NO: 6964) |
| KRAS-862 Target: | 5′-TAATTATGTAAATACAATTTG-3′ |
| | (SEQ ID NO: 6965) |
| KRAS-866 Target: | 5′-TATGTAAATACAATTTGTACT-3′ |
| | (SEQ ID NO: 6966) |
| KRAS-867 Target: | 5′-ATGTAAATACAATTTGTACTT-3′ |
| | (SEQ ID NO: 6967) |
| KRAS-868 Target: | 5′-TGTAAATACAATTTGTACTTT-3′ |
| | (SEQ ID NO: 6968) |
| KRAS-869 Target: | 5′-GTAAATACAATTTGTACTTTT-3′ |
| | (SEQ ID NO: 6969) |
| KRAS-875 Target: | 5′-ACAATTTGTACTTTTTTCTTA-3′ |
| | (SEQ ID NO: 6970) |
| KRAS-876 Target: | 5′-CAATTTGTACTTTTTTCTTAA-3′ |
| | (SEQ ID NO: 6971) |
| KRAS-901 Target: | 5′-TACTAGTACAAGTGGTAATTT-3′ |
| | (SEQ ID NO: 6972) |
| KRAS-902 Target: | 5′-ACTAGTACAAGTGGTAATTTT-3′ |
| | (SEQ ID NO: 6973) |
| KRAS-908 Target: | 5′-ACAAGTGGTAATTTTTGTACA-3′ |
| | (SEQ ID NO: 6974) |
| KRAS-909 Target: | 5′-CAAGTGGTAATTTTTGTACAT-3′ |
| | (SEQ ID NO: 6975) |
| KRAS-916 Target: | 5′-TAATTTTTGTACATTACACTA-3′ |
| | (SEQ ID NO: 6976) |
| KRAS-917 Target: | 5′-AATTTTTGTACATTACACTAA-3′ |
| | (SEQ ID NO: 6977) |
| KRAS-918 Target: | 5′-ATTTTTGTACATTACACTAAA-3′ |
| | (SEQ ID NO: 6978) |
| KRAS-919 Target: | 5′-TTTTTGTACATTACACTAAAT-3′ |
| | (SEQ ID NO: 6979) |
| KRAS-920 Target: | 5′-TTTTGTACATTACACTAAATT-3′ |
| | (SEQ ID NO: 6980) |
| KRAS-932 Target: | 5′-CACTAAATTATTAGCATTTGT-3′ |
| | (SEQ ID NO: 6981) |
| KRAS-934 Target: | 5′-CTAAATTATTAGCATTTGTTT-3′ |
| | (SEQ ID NO: 6982) |
| KRAS-935 Target: | 5′-TAAATTATTAGCATTTGTTTT-3′ |
| | (SEQ ID NO: 6983) |
| KRAS-940 Target: | 5′-TATTAGCATTTGTTTTAGCAT-3′ |
| | (SEQ ID NO: 6984) |
| KRAS-946 Target: | 5′-CATTTGTTTTAGCATTACCTA-3′ |
| | (SEQ ID NO: 6985) |
| KRAS-947 Target: | 5′-ATTTGTTTTAGCATTACCTAA-3′ |
| | (SEQ ID NO: 6986) |
| KRAS-949 Target: | 5′-TTGTTTTAGCATTACCTAATT-3′ |
| | (SEQ ID NO: 6987) |
| KRAS-950 Target: | 5′-TGTTTTAGCATTACCTAATTT-3′ |
| | (SEQ ID NO: 6988) |
| KRAS-951 Target: | 5′-GTTTTAGCATTACCTAATTTT-3′ |
| | (SEQ ID NO: 6989) |
| KRAS-952 Target: | 5 >-TTTTAGCATTACCTAATTTTT-3′ |
| | (SEQ ID NO: 6990) |
| KRAS-988 Target: | 5′-GACTGTTAGCTTTTACCTTAA-3′ |
| | (SEQ ID NO: 6991) |
| KRAS-989 Target: | 5′-ACTGTTAGCTTTTACCTTAAA-3′ |
| | (SEQ ID NO: 6992) |
| KRAS-995 Target: | 5′-AGCTTTTACCTTAAATGCTTA-3′ |
| | (SEQ ID NO: 6993) |
| KRAS-996 Target: | 5′-GCTTTTACCTTAAATGCTTAT-3′ |
| | (SEQ ID NO: 6994) |
| KRAS-997 Target: | 5′-CTTTTACCTTAAATGCTTATT-3′ |
| | (SEQ ID NO: 6995) |
| KRAS-1003 Target: | 5′-CCTTAAATGCTTATTTTAAAA-3′ |
| | (SEQ ID NO: 6996) |
| KRAS-1004 Target: | 5′-CTTAAATGCTTATTTTAAAAT-3′ |
| | (SEQ ID NO: 6997) |
| KRAS-1010 Target: | 5′-TGCTTATTTTAAAATGACAGT-3′ |
| | (SEQ ID NO: 6998) |
| KRAS-1012 Target: | 5′-CTTATTTTAAAATGACAGTGG-3′ |
| | (SEQ ID NO: 6999) |
| KRAS-1029 Target: | 5′-GTGGAAGTTTTTTTTTCCTCT-3′ |
| | (SEQ ID NO: 7000) |
| KRAS-1031 Target: | 5′-GGAAGTTTTTTTTTCCTCTAA-3′ |
| | (SEQ ID NO: 7001) |
| KRAS-1032 Target: | 5′-GAAGTTTTTTTTTCCTCTAAG-3′ |
| | (SEQ ID NO: 7002) |
| KRAS-1070 Target: | 5′-TTTTGGTTTTTGAACTAGCAA-3′ |
| | (SEQ ID NO: 7003) |
| KRAS-1092 Target: | 5′-GCCTGTGAAAAAGAAACTGAA-3′ |
| | (SEQ ID NO: 7004) |
| KRAS-1099 Target: | 5′-AAAAAGAAACTGAATACCTAA-3′ |
| | (SEQ ID NO: 7005) |
| KRAS-1100 Target: | 5′-AAAAGAAACTGAATACCTAAG-3′ |
| | (SEQ ID NO: 7006) |
| KRAS-1106 Target: | 5′-AACTGAATACCTAAGATTTCT-3′ |
| | (SEQ ID NO: 7007) |
| KRAS-1147 Target: | 5′-TGCAGTTGATTACTTCTTATT-3′ |
| | (SEQ ID NO: 7008) |
| KRAS-1148 Target: | 5′-GCAGTTGATTACTTCTTATTT-3′ |
| | (SEQ ID NO: 7009) |
| KRAS-1152 Target: | 5′-TTGATTACTTCTTATTTTTCT-3′ |
| | (SEQ ID NO: 7010) |
| KRAS-1160 Target: | 5′-TTCTTATTTTTCTTACCAATT-3′ |
| | (SEQ ID NO: 7011) |
| KRAS-1161 Target: | 5′-TCTTATTTTTCTTACCAATTG-3′ |
| | (SEQ ID NO: 7012) |
| KRAS-1162 Target: | 5′-CTTATTTTTCTTACCAATTGT-3′ |
| | (SEQ ID NO: 7013) |
| KRAS-1185 Target: | 5′-ATGTTGGTGTGAAACAAATTA-3′ |
| | (SEQ ID NO: 7014) |
| KRAS-1188 Target: | 5′-TTGGTGTGAAACAAATTAATG-3′ |
| | (SEQ ID NO: 7015) |
| KRAS-1189 Target: | 5′-TGGTGTGAAACAAATTAATGA-3′ |
| | (SEQ ID NO: 7016) |
| KRAS-1197 Target: | 5′-AACAAATTAATGAAGCTTTTG-3′ |
| | (SEQ ID NO: 7017) |
| KRAS-1198 Target: | 5′-ACAAATTAATGAAGCTTTTGA-3′ |
| | (SEQ ID NO: 7018) |
| KRAS-1230 Target: | 5′-TCTGTGTTTTATCTAGTCACA-3′ |
| | (SEQ ID NO: 7019) |
| KRAS-1231 Target: | 5′-CTGTGTTTTATCTAGTCACAT-3′ |
| | (SEQ ID NO: 7020) |
| KRAS-1234 Target: | 5′-TGTTTTATCTAGTCACATAAA-3′ |
| | (SEQ ID NO: 7021) |
| KRAS-1235 Target: | 5′-GTTTTATCTAGTCACATAAAT-3′ |
| | (SEQ ID NO: 7022) |
| KRAS-1240 Target: | 5′-ATCTAGTCACATAAATGGATT-3′ |
| | (SEQ ID NO: 7023) |
| KRAS-1241 Target: | 5′-TCTAGTCACATAAATGGATTA-3′ |
| | (SEQ ID NO: 7024) |
| KRAS-1249 Target: | 5′-CATAAATGGATTAATTACTAA-3′ |
| | (SEQ ID NO: 7025) |
| KRAS-1250 Target: | 5′-ATAAATGGATTAATTACTAAT-3′ |
| | (SEQ ID NO: 7026) |
| KRAS-1255 Target: | 5′-TGGATTAATTACTAATTTCAG-3′ |
| | (SEQ ID NO: 7027) |
| KRAS-1257 Target: | 5′-GATTAATTACTAATTTCAGTT-3′ |
| | (SEQ ID NO: 7028) |
| KRAS-1258 Target: | 5′-ATTAATTACTAATTTCAGTTG-3′ |
| | (SEQ ID NO: 7029) |
| KRAS-1259 Target: | 5′-TTAATTACTAATTTCAGTTGA-3′ |
| | (SEQ ID NO: 7030) |
| KRAS-1287 Target: | 5′-TAATTGGTTTTTACTGAAACA-3′ |
| | (SEQ ID NO: 7031) |
| KRAS-1291 Target: | 5′-TGGTTTTTACTGAAACATTGA-3′ |
| | (SEQ ID NO: 7032) |
| KRAS-1292 Target: | 5′-GGTTTTTACTGAAACATTGAG-3′ |
| | (SEQ ID NO: 7033) |
| KRAS-1307 Target: | 5′-ATTGAGGGAACACAAATTTAT-3′ |
| | (SEQ ID NO: 7034) |
| KRAS-1308 Target: | 5′-TTGAGGGAACACAAATTTATG-3′ |
| | (SEQ ID NO: 7035) |
| KRAS-1381 Target: | 5′-TGATGAATGTAAAGTTACACT-3′ |
| | (SEQ ID NO: 7036) |
| KRAS-1382 Target: | 5′-GATGAATGTAAAGTTACACTG-3′ |
| | (SEQ ID NO: 7037) |
| KRAS-1454 Target: | 5′-CCAAAATATTATATTTTTTCT-3′ |
| | (SEQ ID NO: 7038) |
| KRAS-1455 Target: | 5′-CAAAATATTATATTTTTTCTA-3′ |
| | (SEQ ID NO: 7039) |
| KRAS-1456 Target: | 5′-AAAATATTATATTTTTTCTAT-3′ |
| | (SEQ ID NO: 7040) |
| KRAS-1457 Target: | 5′-AAATATTATATTTTTTCTATA-3′ |
| | (SEQ ID NO: 7041) |
| KRAS-1459 Target: | 5′-ATATTATATTTTTTCTATAAA-3′ |
| | (SEQ ID NO: 7042) |
| KRAS-1460 Target: | 5′-TATTATATTTTTTCTATAAAA-3′ |
| | (SEQ ID NO: 7043) |
| KRAS-1461 Target: | 5′-ATTATATTTTTTCTATAAAAA-3′ |
| | (SEQ ID NO: 7044) |
| KRAS-1462 Target: | 5′-TTATATTTTTTCTATAAAAAG-3′ |
| | (SEQ ID NO: 7045) |
| KRAS-1463 Target: | 5′-TATATTTTTTCTATAAAAAGA-3′ |
| | (SEQ ID NO: 7046) |
| KRAS-1464 Target: | 5′-ATATTTTTTCTATAAAAAGAA-3′ |
| | (SEQ ID NO: 7047) |
| KRAS-1465 Target: | 5′-TATTTTTTCTATAAAAAGAAA-3′ |
| | (SEQ ID NO: 7048) |
| KRAS-1466 Target: | 5′-ATTTTTTCTATAAAAAGAAAA-3′ |
| | (SEQ ID NO: 7049) |
| KRAS-1471 Target: | 5′-TTCTATAAAAAGAAAAAAATG-3′ |
| | (SEQ ID NO: 7050) |
| KRAS-1472 Target: | 5′-TCTATAAAAAGAAAAAAATGG-3′ |
| | (SEQ ID NO: 7051) |
| KRAS-1474 Target: | 5′-TATAAAAAGAAAAAAATGGAA-3′ |
| | (SEQ ID NO: 7052) |
| KRAS-1475 Target: | 5′-ATAAAAAGAAAAAAATGGAAA-3′ |
| | (SEQ ID NO: 7053) |
| KRAS-1476 Target: | 5′-TAAAAAGAAAAAAATGGAAAA-3′ |
| | (SEQ ID NO: 7054) |
| KRAS-1477 Target: | 5′-AAAAAGAAAAAAATGGAAAAA-3′ |
| | (SEQ ID NO: 7055) |
| KRAS-1478 Target: | 5′-AAAAGAAAAAAATGGAAAAAA-3′ |
| | (SEQ ID NO: 7056) |
| KRAS-1479 Target: | 5′-AAAGAAAAAAATGGAAAAAAA-3′ |
| | (SEQ ID NO: 7057) |
| KRAS-1480 Target: | 5′-AAGAAAAAAATGGAAAAAAAT-3′ |
| | (SEQ ID NO: 7058) |
| KRAS-1484 Target: | 5′-AAAAAATGGAAAAAAATTACA-3′ |
| | (SEQ ID NO: 7059) |
| KRAS-1485 Target: | 5′-AAAAATGGAAAAAAATTACAA-3′ |
| | (SEQ ID NO: 7060) |
| KRAS-1490 Target: | 5′-TGGAAAAAAATTACAAGGCAA-3′ |
| | (SEQ ID NO: 7061) |
| KRAS-1491 Target: | 5′-GGAAAAAAATTACAAGGCAAT-3′ |
| | (SEQ ID NO: 7062) |
| KRAS-1492 Target: | 5′-GAAAAAAATTACAAGGCAATG-3′ |
| | (SEQ ID NO: 7063) |
| KRAS-1527 Target: | 5′-GCCATTTCCTTTTCACATTAG-3′ |
| | (SEQ ID NO: 7064) |
| KRAS-1533 Target: | 5′-TCCTTTTCACATTAGATAAAT-3′ |
| | (SEQ ID NO: 7065) |
| KRAS-1540 Target: | 5′-CACATTAGATAAATTACTATA-3′ |
| | (SEQ ID NO: 7066) |
| KRAS-1541 Target: | 5′-ACATTAGATAAATTACTATAA-3′ |
| | (SEQ ID NO: 7067) |
| KRAS-1542 Target: | 5′-CATTAGATAAATTACTATAAA-3′ |
| | (SEQ ID NO: 7068) |
| KRAS-1597 Target: | 5′-AGTATGAAATGGGGATTATTA-3′ |
| | (SEQ ID NO: 7069) |
| KRAS-1606 Target: | 5′-TGGGGATTATTATAGCAACCA-3′ |
| | (SEQ ID NO: 7070) |
| KRAS-1633 Target: | 5′-GGCTATATTTACATGCTACTA-3′ |
| | (SEQ ID NO: 7071) |
| KRAS-1634 Target: | 5′-GCTATATTTACATGCTACTAA-3′ |
| | (SEQ ID NO: 7072) |
| KRAS-1635 Target: | 5′-CTATATTTACATGCTACTAAA-3′ |
| | (SEQ ID NO: 7073) |
| KRAS-1636 Target: | 5′-TATATTTACATGCTACTAAAT-3′ |
| | (SEQ ID NO: 7074) |
| KRAS-1637 Target: | 5′-ATATTTACATGCTACTAAATT-3′ |
| | (SEQ ID NO: 7075) |
| KRAS-1642 Target: | 5′-TACATGCTACTAAATTTTTAT-3′ |
| | (SEQ ID NO: 7076) |
| KRAS-1649 Target: | 5′-TACTAAATTTTTATAATAATT-3′ |
| | (SEQ ID NO: 7077) |
| KRAS-1650 Target: | 5′-ACTAAATTTTTATAATAATTG-3′ |
| | (SEQ ID NO: 7078) |
| KRAS-1652 Target: | 5′-TAAATTTTTATAATAATTGAA-3′ |
| | (SEQ ID NO: 7079) |
| KRAS-1653 Target: | 5′-AAATTTTTATAATAATTGAAA-3′ |
| | (SEQ ID NO: 7080) |
| KRAS-1654 Target: | 5′-AATTTTTATAATAATTGAAAA-3′ |
| | (SEQ ID NO: 7081) |
| KRAS-1655 Target: | 5′-ATTTTTATAATAATTGAAAAG-3′ |
| | (SEQ ID NO: 7082) |
| KRAS-1656 Target: | 5′-TT″TT″TATAATAAT″TGAAAAGA-3′ |
| | (SEQ ID NO: 7083) |
| KRAS-1657 Target: | 5′-TTTTATAATAATTGAAAAGAT-3′ |
| | (SEQ ID NO: 7084) |
| KRAS-1658 Target: | 5′-TTTATAATAATTGAAAAGATT-3′ |
| | (SEQ ID NO: 7085) |
| KRAS-1659 Target: | 5′-TTATAATAATTGAAAAGATTT-3′ |
| | (SEQ ID NO: 7086) |
| KRAS-1660 Target: | 5′-TATAATAATTGAAAAGATTTT-3′ |
| | (SEQ ID NO: 7087) |
| KRAS-1664 Target: | 5′-ATAATTGAAAAGATTTTAACA-3′ |
| | (SEQ ID NO: 7088) |
| KRAS-1665 Target: | 5′-TAATTGAAAAGATTTTAACAA-3′ |
| | (SEQ ID NO: 7089) |
| KRAS-1667 Target: | 5′-ATTGAAAAGATTTTAACAAGT-3′ |
| | (SEQ ID NO: 7090) |
| KRAS-1668 Target: | 5′-TTGAAAAGATTTTAACAAGTA-3′ |
| | (SEQ ID NO: 7091) |
| KRAS-1669 Target: | 5′-TGAAAAGATTTTAACAAGTAT-3′ |
| | (SEQ ID NO: 7092) |
| KRAS-1670 Target: | 5′-GAAAAGATTTTAACAAGTATA-3′ |
| | (SEQ ID NO: 7093) |
| KRAS-1671 Target: | 5′-AAAAGATTTTAACAAGTATAA-3′ |
| | (SEQ ID NO: 7094) |
| KRAS-1672 Target: | 5′-AAAGATTTTAACAAGTATAAA-3′ |
| | (SEQ ID NO: 7095) |
| KRAS-1673 Target: | 5′-AAGATTTTAACAAGTATAAAA-3′ |
| | (SEQ ID NO: 7096) |
| KRAS-1674 Target: | 5′-AGATTTTAACAAGTATAAAAA-3′ |
| | (SEQ ID NO: 7097) |
| KRAS-1675 Target: | 5′-GATTTTAACAAGTATAAAAAA-3′ |
| | (SEQ ID NO: 7098) |
| KRAS-1682 Target: | 5′-ACAAGTATAAAAAATTCTCAT-3′ |
| | (SEQ ID NO: 7099) |
| KRAS-1683 Target: | 5′-CAAGTATAAAAAATTCTCATA-3′ |
| | (SEQ ID NO: 7100) |
| KRAS-1684 Target: | 5′-AAGTATAAAAAATTCTCATAG-3′ |
| | (SEQ ID NO: 7101) |
| KRAS-1685 Target: | 5′-AGTATAAAAAATTCTCATAGG-3′ |
| | (SEQ ID NO: 7102) |
| KRAS-1686 Target: | 5′-GTATAAAAAATTCTCATAGGA-3′ |
| | (SEQ ID NO: 7103) |
| KRAS-1687 Target: | 5′-TATAAAAAATTCTCATAGGAA-3′ |
| | (SEQ ID NO: 7104) |
| KRAS-1688 Target: | 5′-ATAAAAAATTCTCATAGGAAT-3′ |
| | (SEQ ID NO: 7105) |
| KRAS-1689 Target: | 5′-TAAAAAATTCTCATAGGAATT-3′ |
| | (SEQ ID NO: 7106) |
| KRAS-1691 Target: | 5′-AAAAATTCTCATAGGAATTAA-3′ |
| | (SEQ ID NO: 7107) |
| KRAS-1692 Target: | 5′-AAAATTCTCATAGGAATTAAA-3′ |
| | (SEQ ID NO: 7108) |
| KRAS-1736 Target: | 5′-CTCTTTCATAGTATAACTTTA-3′ |
| | (SEQ ID NO: 7109) |
| KRAS-1741 Target: | 5′-TCATAGTATAACTTTAAATCT-3′ |
| | (SEQ ID NO: 7110) |
| KRAS-1742 Target: | 5′-CATAGTATAACTTTAAATCTT-3′ |
| | (SEQ ID NO: 7111) |
| KRAS-1753 Target: | 5′-TTTAAATCTTTTCTTCAACTT-3′ |
| | (SEQ ID NO: 7112) |
| KRAS-1754 Target: | 5′-TTAAATCTTTTCTTCAACTTG-3′ |
| | (SEQ ID NO: 7113) |
| KRAS-1769 Target: | 5′-AACTTGAGTCTTTGAAGATAG-3′ |
| | (SEQ ID NO: 7114) |
| KRAS-1771 Target: | 5′-CTTGAGTCTTTGAAGATAGTT-3′ |
| | (SEQ ID NO: 7115) |
| KRAS-1772 Target: | 5′-TTGAGTCTTTGAAGATAGTTT-3′ |
| | (SEQ ID NO: 7116) |
| KRAS-1783 Target: | 5′-AAGATAGTTTTAATTCTGCTT-3′ |
| | (SEQ ID NO: 7117) |
| KRAS-1784 Target: | 5′-AGATAGTTTTAATTCTGCTTG-3′ |
| | (SEQ ID NO: 7118) |
| KRAS-1785 Target: | 5′-GATAGTTTTAATTCTGCTTGT-3′ |
| | (SEQ ID NO: 7119) |
| KRAS-1799 Target: | 5′-TGCTTGTGACATTAAAAGATT-3′ |
| | (SEQ ID NO: 7120) |
| KRAS-2047 Target: | 5′-AGCATTGCTTTTGTTTCTTAA-3′ |
| | (SEQ ID NO: 7121) |
| KRAS-2048 Target: | 5′-GCATTGCTTTTGTTTCTTAAG-3′ |
| | (SEQ ID NO: 7122) |
| KRAS-2054 Target: | 5′-CTTTTGTTTCTTAAGAAAACA-3′ |
| | (SEQ ID NO: 7123) |
| KRAS-2061 Target: | 5′-TTCTTAAGAAAACAAACTCTT-3′ |
| | (SEQ ID NO: 7124) |
| KRAS-2062 Target: | 5′-TCTTAAGAAAACAAACTCTTT-3′ |
| | (SEQ ID NO: 7125) |
| KRAS-2063 Target: | 5′-CTTAAGAAAACAAACTCTTTT-3′ |
| | (SEQ ID NO: 7126) |
| KRAS-2064 Target: | 5′-TTAAGAAAACAAACTCTTTTT-3′ |
| | (SEQ ID NO: 7127) |
| KRAS-2065 Target: | 5′-TAAGAAAACAAACTCTTTTTT-3′ |
| | (SEQ ID NO: 7128) |
| KRAS-2066 Target: | 5′-AAGAAAACAAACTCTTTTTTA-3′ |
| | (SEQ ID NO: 7129) |
| KRAS-2067 Target: | 5′-AGAAAACAAACTCTTTTTTAA-3′ |
| | (SEQ ID NO: 7130) |
| KRAS-2071 Target: | 5′-AACAAACTCTTTTTTAAAAAT-3′ |
| | (SEQ ID NO: 7131) |
| KRAS-2077 Target: | 5′-CTCTTTTTTAAAAATTACTTT-3′ |
| | (SEQ ID NO: 7132) |
| KRAS-2078 Target: | 5′-TCTTTTTTAAAAATTACTTTT-3′ |
| | (SEQ ID NO: 7133) |
| KRAS-2079 Target: | 5′-CTTTTTTAAAAATTACTTTTA-3′ |
| | (SEQ ID NO: 7134) |
| KRAS-2080 Target: | 5′-TTTTTTAAAAATTACTTTTAA-3′ |
| | (SEQ ID NO: 7135) |
| KRAS-2081 Target: | 5′-TTTTTAAAAATTACTTTTAAA-3′ |
| | (SEQ ID NO: 7136) |
| KRAS-2082 Target: | 5′-TTTTAAAAATTACTTTTAAAT-3′ |
| | (SEQ ID NO: 7137) |
| KRAS-2083 Target: | 5′-TTTAAAAATTACTTTTAAATA-3′ |
| | (SEQ ID NO: 7138) |
| KRAS-2084 Target: | 5′-TTAAAAATTACTTTTAAATAT-3′ |
| | (SEQ ID NO: 7139) |
| KRAS-2085 Target: | 5′-TAAAAATTACTTTTAAATATT-3′ |
| | (SEQ ID NO: 7140) |
| KRAS-2092 Target: | 5′-TACTTTTAAATATTAACTCAA-3′ |
| | (SEQ ID NO: 7141) |
| KRAS-2093 Target: | 5′-ACTTTTAAATATTAACTCAAA-3′ |
| | (SEQ ID NO: 7142) |
| KRAS-2095 Target: | 5′-TTTTAAATATTAACTCAAAAG-3′ |
| | (SEQ ID NO: 7143) |
| KRAS-2097 Target: | 5′-TTAAATATTAACTCAAAAGTT-3′ |
| | (SEQ ID NO: 7144) |
| KRAS-2098 Target: | 5′-TAAATATTAACTCAAAAGTTG-3′ |
| | (SEQ ID NO: 7145) |
| KRAS-2099 Target: | 5′-AAATATTAACTCAAAAGTTGA-3′ |
| | (SEQ ID NO: 7146) |
| KRAS-2100 Target: | 5′-AATATTAACTCAAAAGTTGAG-3′ |
| | (SEQ ID NO: 7147) |
| KRAS-2134 Target: | 5′-GGTGTGCCAAGACATTAATTT-3′ |
| | (SEQ ID NO: 7148) |
| KRAS-2139 Target: | 5′-GCCAAGACATTAATTTTTTTT-3′ |
| | (SEQ ID NO: 7149) |
| KRAS-2140 Target: | 5′-CCAAGACATTAATTTTTTTTT-3′ |
| | (SEQ ID NO: 7150) |
| KRAS-2146 Target: | 5′-CATTAATTTTTTTTTTAAACA-3′ |
| | (SEQ ID NO: 7151) |
| KRAS-2147 Target: | 5′-ATTAATTTTTTTTTTAAACAA-3′ |
| | (SEQ ID NO: 7152) |
| KRAS-2149 Target: | 5′-TAATTTTTTTTTTAAACAATG-3′ |
| | (SEQ ID NO: 7153) |
| KRAS-2151 Target: | 5′-ATTTTTTTTTTAAACAATGAA-3′ |
| | (SEQ ID NO: 7154) |
| KRAS-2152 Target: | 5′-TTTTTTTTTTAAACAATGAAG-3′ |
| | (SEQ ID NO: 7155) |
| KRAS-2153 Target: | 5′-TTTTTTTTTAAACAATGAAGT-3′ |
| | (SEQ ID NO: 7156) |
| KRAS-2154 Target: | 5′-TTTTTTTTAAACAATGAAGTG-3′ |
| | (SEQ ID NO: 7157) |
| KRAS-2155 Target: | 5′-TTTTTTTAAACAATGAAGTGA-3′ |
| | (SEQ ID NO: 7158) |
| KRAS-2157 Target: | 5′-TTTTTAAACAATGAAGTGAAA-3′ |
| | (SEQ ID NO: 7159) |
| KRAS-2158 Target: | 5′-TTTTAAACAATGAAGTGAAAA-3′ |
| | (SEQ ID NO: 7160) |
| KRAS-2159 Target: | 5′-TTTAAACAATGAAGTGAAAAA-3′ |
| | (SEQ ID NO: 7161) |
| KRAS-2167 Target: | 5′-ATGAAGTGAAAAAGTTTTACA-3′ |
| | (SEQ ID NO: 7162) |
| KRAS-2173 Target: | 5′-TGAAAAAGTTTTACAATCTCT-3′ |
| | (SEQ ID NO: 7163) |
| KRAS-2174 Target: | 5′-GAAAAAGTTTTACAATCTCTA-3′ |
| | (SEQ ID NO: 7164) |
| KRAS-2175 Target: | 5′-AAAAAGTTTTACAATCTCTAG-3′ |
| | (SEQ ID NO: 7165) |
| KRAS-2216 Target: | 5′-ACTGGTTAAATTAACATTGCA-3′ |
| | (SEQ ID NO: 7166) |
| KRAS-2217 Target: | 5′-CTGGTTAAATTAACATTGCAT-3′ |
| | (SEQ ID NO: 7167) |
| KRAS-2218 Target: | 5′-TGGTTAAATTAACATTGCATA-3′ |
| | (SEQ ID NO: 7168) |
| KRAS-2229 Target: | 5′-ACATTGCATAAACACTTTTCA-3′ |
| | (SEQ ID NO: 7169) |
| KRAS-2247 Target: | 5′-TCAAGTCTGATCCATATTTAA-3′ |
| | (SEQ ID NO: 7170) |
| KRAS-2257 Target: | 5′-TCCATATTTAATAATGCTTTA-3′ |
| | (SEQ ID NO: 7171) |
| KRAS-2258 Target: | 5′-CCATATTTAATAATGCTTTAA-3′ |
| | (SEQ ID NO: 7172) |
| KRAS-2259 Target: | 5′-CATATTTAATAATGCTTTAAA-3′ |
| | (SEQ ID NO: 7173) |
| KRAS-2260 Target: | 5′-ATATTTAATAATGCTTTAAAA-3′ |
| | (SEQ ID NO: 7174) |
| KRAS-2261 Target: | 5′-TATTTAATAATGCTTTAAAAT-3′ |
| | (SEQ ID NO: 7175) |
| KRAS-2262 Target: | 5′-ATTTAATAATGCTTTAAAATA-3′ |
| | (SEQ ID NO: 7176) |
| KRAS-2264 Target: | 5′-TTAATAATGCTTTAAAATAAA-3′ |
| | (SEQ ID NO: 7177) |
| KRAS-2265 Target: | 5′-TAATAATGCTTTAAAATAAAA-3′ |
| | (SEQ ID NO: 7178) |
| KRAS-2266 Target: | 5′-AATAATGCTTTAAAATAAAAA-3′ |
| | (SEQ ID NO: 7179) |
| KRAS-2267 Target: | 5′-ATAATGCTTTAAAATAAAAAT-3′ |
| | (SEQ ID NO: 7180) |
| KRAS-2274 Target: | 5′-TTTAAAATAAAAATAAAAACA-3′ |
| | (SEQ ID NO: 7181) |
| KRAS-2280 Target: | 5′-ATAAAAATAAAAACAATCCTT-3′ |
| | (SEQ ID NO: 7182) |
| KRAS-2281 Target: | 5′-TAAAAATAAAAACAATCCTTT-3′ |
| | (SEQ ID NO: 7183) |
| KRAS-2282 Target: | 5′-AAAAATAAAAACAATCCTTTT-3′ |
| | (SEQ ID NO: 7184) |
| KRAS-2283 Target: | 5′-AAAATAAAAACAATCCTTTTG-3′ |
| | (SEQ ID NO: 7185) |
| KRAS-2284 Target: | 5′-AAATAAAAACAATCCTTTTGA-3′ |
| | (SEQ ID NO: 7186) |
| KRAS-2285 Target: | 5′-AATAAAAACAATCCTTTTGAT-3′ |
| | (SEQ ID NO: 7187) |
| KRAS-2286 Target: | 5′-ATAAAAACAATCCTTTTGATA-3′ |
| | (SEQ ID NO: 7188) |
| KRAS-2287 Target: | 5′-TAAAAACAATCCTTTTGATAA-3′ |
| | (SEQ ID NO: 7189) |
| KRAS-2291 Target: | 5′-AACAATCCTTTTGATAAATTT-3′ |
| | (SEQ ID NO: 7190) |
| KRAS-2296 Target: | 5′-TCCTTTTGATAAATTTAAAAT-3′ |
| | (SEQ ID NO: 7191) |
| KRAS-2297 Target: | 5′-CCTTTTGATAAATTTAAAATG-3′ |
| | (SEQ ID NO: 7192) |
| KRAS-2298 Target: | 5′-CTTTTGATAAATTTAAAATGT-3′ |
| | (SEQ ID NO: 7193) |
| KRAS-2302 Target: | 5′-TGATAAATTTAAAATGTTACT-3′ |
| | (SEQ ID NO: 7194) |
| KRAS-2303 Target: | 5′-GATAAATTTAAAATGTTACTT-3′ |
| | (SEQ ID NO: 7195) |
| KRAS-2304 Target: | 5′-ATAAATTTAAAATGTTACTTA-3′ |
| | (SEQ ID NO: 7196) |
| KRAS-2305 Target: | 5′-TAAATTTAAAATGTTACTTAT-3′ |
| | (SEQ ID NO: 7197) |
| KRAS-2306 Target: | 5′-AAATTTAAAATGTTACTTATT-3′ |
| | (SEQ ID NO: 7198) |
| KRAS-2307 Target: | 5′-AATTTAAAATGTTACTTATTT-3′ |
| | (SEQ ID NO: 7199) |
| KRAS-2309 Target: | 5′-TTTAAAATGTTACTTATTTTA-3′ |
| | (SEQ ID NO: 7200) |
| KRAS-2310 Target: | 5′-TTAAAATGTTACTTATTTTAA-3′ |
| | (SEQ ID NO: 7201) |
| KRAS-2311 Target: | 5′-TAAAATGTTACTTATTTTAAA-3′ |
| | (SEQ ID NO: 7202) |
| KRAS-2312 Target: | 5′-AAAATGTTACTTATTTTAAAA-3′ |
| | (SEQ ID NO: 7203) |
| KRAS-2313 Target: | 5′-AAATGTTACTTATTTTAAAAT-3′ |
| | (SEQ ID NO: 7204) |
| KRAS-2315 Target: | 5′-ATGTTACTTATTTTAAAATAA-3′ |
| | (SEQ ID NO: 7205) |
| KRAS-2320 Target: | 5′-ACTTATTTTAAAATAAATGAA-3′ |
| | (SEQ ID NO: 7206) |
| KRAS-2322 Target: | 5′-TTATTTTAAAATAAATGAAGT-3′ |
| | (SEQ ID NO: 7207) |
| KRAS-2323 Target: | 5′-TATTTTAAAATAAATGAAGTG-3′ |
| | (SEQ ID NO: 7208) |
| KRAS-2326 Target: | 5′-TTTAAAATAAATGAAGTGAGA-3′ |
| | (SEQ ID NO: 7209) |
| KRAS-2327 Target: | 5′-TTAAAATAAATGAAGTGAGAT-3′ |
| | (SEQ ID NO: 7210) |
| KRAS-2447 Target: | 5′-TCCATTTCTTCATGTTAAAAG-3′ |
| | (SEQ ID NO: 7211) |
| KRAS-2448 Target: | 5′-CCATTTCTTCATGTTAAAAGA-3′ |
| | (SEQ ID NO: 7212) |
| KRAS-2475 Target: | 5′-CTCAAACTCTTAGTTTTTTTT-3′ |
| | (SEQ ID NO: 7213) |
| KRAS-2485 Target: | 5′-TAGTTTTTTTTTTTTACAACT-3′ |
| | (SEQ ID NO: 7214) |
| KRAS-2486 Target: | 5′-AGTTTTTTTTTTTTACAACTA-3′ |
| | (SEQ ID NO: 7215) |
| KRAS-2487 Target: | 5′-GTTTTTTTTTTTTACAACTAT-3′ |
| | (SEQ ID NO: 7216) |
| KRAS-2488 Target: | 5′-TTTTTTTTTTTTACAACTATG-3′ |
| | (SEQ ID NO: 7217) |
| KRAS-2489 Target: | 5′-TTTTTTTTTTTACAACTATGT-3′ |
| | (SEQ ID NO: 7218) |
| KRAS-2490 Target: | 5′-TTTTTTTTTTAGAAGTATGTA-3′ |
| | (SEQ ID NO: 7219) |
| KRAS-2491 Target: | 5′-TTTTTTTTTAGAAGTATGTAA-3′ |
| | (SEQ ID NO: 7220) |
| KRAS-2492 Target: | 5′-TTTTTTTTAGAAGTATGTAAT-3′ |
| | (SEQ ID NO: 7221) |
| KRAS-2493 Target: | 5′-TTTTTTTAGAAGTATGTAATT-3′ |
| | (SEQ ID NO: 7222) |
| KRAS-2494 Target: | 5′-TTTTTTAGAAGTATGTAATTT-3′ |
| | (SEQ ID NO: 7223) |
| KRAS-2495 Target: | 5′-TTTTTAGAAGTATGTAATTTA-3′ |
| | (SEQ ID NO: 7224) |
| KRAS-2502 Target: | 5′-AACTATGTAATTTATATTCCA-3′ |
| | (SEQ ID NO: 7225) |
| KRAS-2503 Target: | 5′-ACTATGTAATTTATATTCCAT-3′ |
| | (SEQ ID NO: 7226) |
| KRAS-2504 Target: | 5′-CTATGTAATTTATATTCCATT-3′ |
| | (SEQ ID NO: 7227) |
| KRAS-2510 Target: | 5′-AATTTATATTCCATTTACATA-3′ |
| | (SEQ ID NO: 7228) |
| KRAS-2511 Target: | 5′-ATTTATATTCCATTTACATAA-3′ |
| | (SEQ ID NO: 7229) |
| KRAS-2512 Target: | 5′-TTTATATTCCATTTACATAAG-3′ |
| | (SEQ ID NO: 7230) |
| KRAS-2513 Target: | 5′-TTATATTCCATTTACATAAGG-3′ |
| | (SEQ ID NO: 7231) |
| KRAS-2525 Target: | 5′-TACATAAGGATACACTTATTT-3′ |
| | (SEQ ID NO: 7232) |
| KRAS-2529 Target: | 5′-TAAGGATACACTTATTTGTCA-3′ |
| | (SEQ ID NO: 7233) |
| KRAS-2561 Target: | 5′-ATCTGTAAATTTTTAACCTAT-3′ |
| | (SEQ ID NO: 7234) |
| KRAS-2562 Target: | 5′-TCTGTAAATTTTTAACCTATG-3′ |
| | (SEQ ID NO: 7235) |
| KRAS-2563 Target: | 5′-CTGTAAATTTTTAACCTATGT-3′ |
| | (SEQ ID NO: 7236) |
| KRAS-2619 Target: | 5′-TGCAAGAGGTGAAGTTTATAT-3′ |
| | (SEQ ID NO: 7237) |
| KRAS-2621 Target: | 5′-CAAGAGGTGAAGTTTATATTT-3′ |
| | (SEQ ID NO: 7238) |
| KRAS-2622 Target: | 5′-AAGAGGTGAAGTTTATATTTG-3′ |
| | (SEQ ID NO: 7239) |
| KRAS-2624 Target: | 5′-GAGGTGAAGTTTATATTTGAA-3′ |
| | (SEQ ID NO: 7240) |
| KRAS-2625 Target: | 5′-AGGTGAAGTTTATATTTGAAT-3′ |
| | (SEQ ID NO: 7241) |
| KRAS-2630 Target: | 5′-AAGTTTATATTTGAATATCCA-3′ |
| | (SEQ ID NO: 7242) |
| KRAS-2718 Target: | 5′-ACTTGATGCAGTTTTAATACT-3′ |
| | (SEQ ID NO: 7243) |
| KRAS-2720 Target: | 5′-TTGATGCAGTTTTAATACTTG-3′ |
| | (SEQ ID NO: 7244) |
| KRAS-2871 Target: | 5′-GATTTGACCTAATCACTAATT-3′ |
| | (SEQ ID NO: 7245) |
| KRAS-2877 Target: | 5′-ACCTAATCACTAATTTTCAGG-3′ |
| | (SEQ ID NO: 7246) |
| KRAS-2946 Target: | 5′-CAGTAGGATTTTTCAAACCTG-3′ |
| | (SEQ ID NO: 7247) |
| KRAS-2991 Target: | 5′-AGTGGAAGGAGAATTTAATAA-3′ |
| | (SEQ ID NO: 7248) |
| KRAS-2994 Target: | 5′-GGAAGGAGAATTTAATAAAGA-3′ |
| | (SEQ ID NO: 7249) |
| KRAS-2996 Target: | 5′-AAGGAGAATTTAATAAAGATA-3′ |
| | (SEQ ID NO: 7250) |
| KRAS-2997 Target: | 5′-AGGAGAATTTAATAAAGATAG-3′ |
| | (SEQ ID NO: 7251) |
| KRAS-3001 Target: | 5′-GAATTTAATAAAGATAGTGCT-3′ |
| | (SEQ ID NO: 7252) |
| KRAS-3030 Target: | 5′-TCCTTAGGTAATCTATAACTA-3′ |
| | (SEQ ID NO: 7253) |
| KRAS-3031 Target: | 5′-CCTTAGGTAATCTATAACTAG-3′ |
| | (SEQ ID NO: 7254) |
| KRAS-3065 Target: | 5′-AACAGTAATACATTCCATTGT-3′ |
| | (SEQ ID NO: 7255) |
| KRAS-3067 Target: | 5′-CAGTAATACATTCCATTGTTT-3′ |
| | (SEQ ID NO: 7256) |
| KRAS-3068 Target: | 5′-AGTAATACATTCCATTGTTTT-3′ |
| | (SEQ ID NO: 7257) |
| KRAS-3069 Target: | 5′-GTAATACATTCCATTGTTTTA-3′ |
| | (SEQ ID NO: 7258) |
| KRAS-3079 Target: | 5′-CCATTGTTTTAGTAACCAGAA-3′ |
| | (SEQ ID NO: 7259) |
| KRAS-3093 Target: | 5′-ACCAGAAATCTTCATGCAATG-3′ |
| | (SEQ ID NO: 7260) |
| KRAS-3103 Target: | 5′-TTCATGCAATGAAAAATACTT-3′ |
| | (SEQ ID NO: 7261) |
| KRAS-3110 Target: | 5′-AATGAAAAATACTTTAATTCA-3′ |
| | (SEQ ID NO: 7262) |
| KRAS-3112 Target: | 5′-TGAAAAATACTTTAATTCATG-3′ |
| | (SEQ ID NO: 7263) |
| KRAS-3113 Target: | 5′-GAAAAATACTTTAATTCATGA-3′ |
| | (SEQ ID NO: 7264) |
| KRAS-3127 Target: | 5′-TTCATGAAGCTTACTTTTTTT-3′ |
| | (SEQ ID NO: 7265) |
| KRAS-3130 Target: | 5′-ATGAAGCTTACTTTTTTTTTT-3′ |
| | (SEQ ID NO: 7266) |
| KRAS-3134 Target: | 5′-AGCTTACTTTTTTTTTTTGGT-3′ |
| | (SEQ ID NO: 7267) |
| KRAS-3138 Target: | 5′-TACTTTTTTTTTTTGGTGTCA-3′ |
| | (SEQ ID NO: 7268) |
| KRAS-3139 Target: | 5′-ACTTTTTTTTTTTGGTGTCAG-3′ |
| | (SEQ ID NO: 7269) |
| KRAS-3297 Target: | 5′-AACTAATTTTTGTATTTTTAG-3′ |
| | (SEQ ID NO: 7270) |
| KRAS-3300 Target: | 5′-TAATTTTTGTATTTTTAGGAG-3′ |
| | (SEQ ID NO: 7271) |
| KRAS-3413 Target: | 5′-CTCATTTATTCAGCAAATATT-3′ |
| | (SEQ ID NO: 7272) |
| KRAS-3415 Target: | 5′-CATTTATTCAGCAAATATTTA-3′ |
| | (SEQ ID NO: 7273) |
| KRAS-3417 Target: | 5′-TTTATTCAGCAAATATTTATT-3′ |
| | (SEQ ID NO: 7274) |
| KRAS-3589 Target: | 5′-TATTTTAGTTTTGCAAAGAAG-3′ |
| | (SEQ ID NO: 7275) |
| KRAS-3630 Target: | 5′-CTCTATAATTGTTTTGCTACG-3′ |
| | (SEQ ID NO: 7276) |
| KRAS-3677 Target: | 5′-TACTTTATGTAAATCACTTCA-3′ |
| | (SEQ ID NO: 7277) |
| KRAS-3678 Target: | 5′-ACTTTATGTAAATCACTTCAT-3′ |
| | (SEQ ID NO: 7278) |
| KRAS-3679 Target: | 5′-CTTTATGTAAATCACTTCATT-3′ |
| | (SEQ ID NO: 7279) |
| KRAS-3680 Target: | 5′-TTTATGTAAATCACTTCATTG-3′ |
| | (SEQ ID NO: 7280) |
| KRAS-3681 Target: | 5′-TTATGTAAATCACTTCATTGT-3′ |
| | (SEQ ID NO: 7281) |
| KRAS-3682 Target: | 5′-TATGTAAATCACTTCATTGTT-3′ |
| | (SEQ ID NO: 7282) |
| KRAS-3683 Target: | 5′-ATGTAAATCACTTCATTGTTT-3′ |
| | (SEQ ID NO: 7283) |
| KRAS-3697 Target: | 5′-ATTGTTTTAAAGGAATAAACT-3′ |
| | (SEQ ID NO: 7284) |
| KRAS-3698 Target: | 5′-TTGTTTTAAAGGAATAAACTT-3′ |
| | (SEQ ID NO: 7285) |
| KRAS-3701 Target: | 5′-TTTTAAAGGAATAAACTTGAT-3′ |
| | (SEQ ID NO: 7286) |
| KRAS-3702 Target: | 5′-TTTAAAGGAATAAACTTGATT-3′ |
| | (SEQ ID NO: 7287) |
| KRAS-3703 Target: | 5′-TTAAAGGAATAAACTTGATTA-3′ |
| | (SEQ ID NO: 7288) |
| KRAS-3705 Target: | 5′-AAAGGAATAAACTTGATTATA-3′ |
| | (SEQ ID NO: 7289) |
| KRAS-3706 Target: | 5′-AAGGAATAAACTTGATTATAT-3′ |
| | (SEQ ID NO: 7290) |
| KRAS-3707 Target: | 5′-AGGAATAAACTTGATTATATT-3′ |
| | (SEQ ID NO: 7291) |
| KRAS-3708 Target: | 5′-GGAATAAACTTGATTATATTG-3′ |
| | (SEQ ID NO: 7292) |
| KRAS-3709 Target: | 5′-GAATAAACTTGATTATATTGT-3′ |
| | (SEQ ID NO: 7293) |
| KRAS-3714 Target: | 5′-AACTTGATTATATTGTTTTTT-3′ |
| | (SEQ ID NO: 7294) |
| KRAS-3715 Target: | 5′-ACTTGATTATATTGTTTTTTT-3′ |
| | (SEQ ID NO: 7295) |
| KRAS-3718 Target: | 5′-TGATTATATTGTTTTTTTATT-3′ |
| | (SEQ ID NO: 7296) |
| KRAS-3723 Target: | 5′-ATATTGTTTTTTTATTTGGCA-3′ |
| | (SEQ ID NO: 7297) |
| KRAS-3724 Target: | 5′-TATTGTTTTTTTATTTGGCAT-3′ |
| | (SEQ ID NO: 7298) |
| KRAS-3728 Target: | 5′-GTTTTTTTATTTGGCATAACT-3′ |
| | (SEQ ID NO: 7299) |
| KRAS-3729 Target: | 5′-TTTTTTTATTTGGCATAACTG-3′ |
| | (SEQ ID NO: 7300) |
| KRAS-3741 Target: | 5′-GCATAACTGTGATTCTTTTAG-3′ |
| | (SEQ ID NO: 7301) |
| KRAS-3746 Target: | 5′-ACTGTGATTCTTTTAGGACAA-3′ |
| | (SEQ ID NO: 7302) |
| KRAS-3747 Target: | 5′-CTGTGATTCTTTTAGGACAAT-3′ |
| | (SEQ ID NO: 7303) |
| KRAS-3783 Target: | 5′-GGTGTATGTCAGATATTCATA-3′ |
| | (SEQ ID NO: 7304) |
| KRAS-3784 Target: | 5′-GTGTATGTCAGATATTCATAT-3′ |
| | (SEQ ID NO: 7305) |
| KRAS-3810 Target: | 5′-CAAATGTGTAATATTCCAGTT-3′ |
| | (SEQ ID NO: 7306) |
| KRAS-3838 Target: | 5′-CATAAGTAATTAAAATATACT-3′ |
| | (SEQ ID NO: 7307) |
| KRAS-3839 Target: | 5′-ATAAGTAATTAAAATATACTT-3′ |
| | (SEQ ID NO: 7308) |
| KRAS-3840 Target: | 5′-TAAGTAATTAAAATATACTTA-3′ |
| | (SEQ ID NO: 7309) |
| KRAS-3841 Target: | 5′-AAGTAATTAAAATATACTTAA-3′ |
| | (SEQ ID NO: 7310) |
| KRAS-3842 Target: | 5′-AGTAATTAAAATATACTTAAA-3′ |
| | (SEQ ID NO: 7311) |
| KRAS-3843 Target: | 5′-GTAATTAAAATATACTTAAAA-3′ |
| | (SEQ ID NO: 7312) |
| KRAS-3844 Target: | 5′-TAATTAAAATATACTTAAAAA-3′ |
| | (SEQ ID NO: 7313) |
| KRAS-3845 Target: | 5′-AATTAAAATATACTTAAAAAT-3′ |
| | (SEQ ID NO: 7314) |
| KRAS-3846 Target: | 5′-ATTAAAATATACTTAAAAATT-3′ |
| | (SEQ ID NO: 7315) |
| KRAS-3848 Target: | 5′-TAAAATATACTTAAAAATTAA-3′ |
| | (SEQ ID NO: 7316) |
| KRAS-3849 Target: | 5′-AAAATATACTTAAAAATTAAT-3′ |
| | (SEQ ID NO: 7317) |
| KRAS-3850 Target: | 5′-AAATATACTTAAAAATTAATA-3′ |
| | (SEQ ID NO: 7318) |
| KRAS-3851 Target: | 5′-AATATACTTAAAAATTAATAG-3′ |
| | (SEQ ID NO: 7319) |
| KRAS-3855 Target: | 5′-TACTTAAAAATTAATAGTTTT-3′ |
| | (SEQ ID NO: 7320) |
| KRAS-3859 Target: | 5′-TAAAAATTAATAGTTTTATCT-3′ |
| | (SEQ ID NO: 7321) |
| KRAS-3860 Target: | 5′-AAAAATTAATAGTTTTATCTG-3′ |
| | (SEQ ID NO: 7322) |
| KRAS-3861 Target: | 5′-AAAATTAATAGTTTTATCTGG-3′ |
| | (SEQ ID NO: 7323) |
| KRAS-3876 Target: | 5′-ATCTGGGTACAAATAAACAGG-3′ |
| | (SEQ ID NO: 7324) |
| KRAS-3915 Target: | 5′-GACAAGGAAACTTCTATGTAA-3′ |
| | (SEQ ID NO: 7325) |
| KRAS-3916 Target: | 5′-ACAAGGAAACTTCTATGTAAA-3′ |
| | (SEQ ID NO: 7326) |
| KRAS-3917 Target: | 5′-CAAGGAAACTTCTATGTAAAA-3′ |
| | (SEQ ID NO: 7327) |
| KRAS-3926 Target: | 5′-TTCTATGTAAAAATCACTATG-3′ |
| | (SEQ ID NO: 7328) |
| KRAS-3927 Target: | 5′-TCTATGTAAAAATCACTATGA-3′ |
| | (SEQ ID NO: 7329) |
| KRAS-3928 Target: | 5′-CTATGTAAAAATCACTATGAT-3′ |
| | (SEQ ID NO: 7330) |
| KRAS-3932 Target: | 5′-GTAAAAATCACTATGATTTCT-3′ |
| | (SEQ ID NO: 7331) |
| KRAS-3933 Target: | 5′-TAAAAATCACTATGATTTCTG-3′ |
| | (SEQ ID NO: 7332) |
| KRAS-3942 Target: | 5′-CTATGATTTCTGAATTGCTAT-3′ |
| | (SEQ ID NO: 7333) |
| KRAS-3943 Target: | 5′-TATGATTTCTGAATTGCTATG-3′ |
| | (SEQ ID NO: 7334) |
| KRAS-3960 Target: | 5′-TATGTGAAACTACAGATCTTT-3′ |
| | (SEQ ID NO: 7335) |
| KRAS-3961 Target: | 5′-ATGTGAAACTACAGATCTTTG-3′ |
| | (SEQ ID NO: 7336) |
| KRAS-3997 Target: | 5′-AGGGTGTTAAGACTTACACAG-3′ |
| | (SEQ ID NO: 7337) |
| KRAS-4084 Target: | 5′-TTTAGGCCTCTTGAATTTTTG-3′ |
| | (SEQ ID NO: 7338) |
| KRAS-4092 Target: | 5′-TCTTGAATTTTTGATGTAGAT-3′ |
| | (SEQ ID NO: 7339) |
| KRAS-4093 Target: | 5′-CTTGAATTTTTGATGTAGATG-3′ |
| | (SEQ ID NO: 7340) |
| KRAS-4108 Target: | 5′-TAGATGGGCATTTTTTTAAGG-3′ |
| | (SEQ ID NO: 7341) |
| KRAS-4114 Target: | 5′-GGCATTTTTTTAAGGTAGTGG-3′ |
| | (SEQ ID NO: 7342) |
| KRAS-4126 Target: | 5′-AGGTAGTGGTTAATTACCTTT-3′ |
| | (SEQ ID NO: 7343) |
| KRAS-4128 Target: | 5′-GTAGTGGTTAATTACCTTTAT-3′ |
| | (SEQ ID NO: 7344) |
| KRAS-4129 Target: | 5′-TAGTGGTTAATTACCTTTATG-3′ |
| | (SEQ ID NO: 7345) |
| KRAS-4130 Target: | 5′-AGTGGTTAATTACCTTTATGT-3′ |
| | (SEQ ID NO: 7346) |
| KRAS-4131 Target: | 5′-GTGGTTAATTACCTTTATGTG-3′ |
| | (SEQ ID NO: 7347) |
| KRAS-4141 Target: | 5′-ACCTTTATGTGAACTTTGAAT-3′ |
| | (SEQ ID NO: 7348) |
| KRAS-4146 Target: | 5′-TATGTGAACTTTGAATGGTTT-3′ |
| | (SEQ ID NO: 7349) |
| KRAS-4152 Target: | 5′-AACTTTGAATGGTTTAACAAA-3′ |
| | (SEQ ID NO: 7350) |
| KRAS-4156 Target: | 5′-TTGAATGGTTTAACAAAAGAT-3′ |
| | (SEQ ID NO: 7351) |
| KRAS-4157 Target: | 5′-TGAATGGTTTAACAAAAGATT-3′ |
| | (SEQ ID NO: 7352) |
| KRAS-4158 Target: | 5′-GAATGGTTTAACAAAAGATTT-3′ |
| | (SEQ ID NO: 7353) |
| KRAS-4159 Target: | 5′-AATGGTTTAACAAAAGATTTG-3′ |
| | (SEQ ID NO: 7354) |
| KRAS-4160 Target: | 5′-ATGGTTTAACAAAAGATTTGT-3′ |
| | (SEQ ID NO: 7355) |
| KRAS-4162 Target: | 5′-GGTTTAACAAAAGATTTGTTT-3′ |
| | (SEQ ID NO: 7356) |
| KRAS-4163 Target: | 5′-GTTTAACAAAAGATTTGTTTT-3′ |
| | (SEQ ID NO: 7357) |
| KRAS-4167 Target: | 5′-AACAAAAGATTTGTTTTTGTA-3′ |
| | (SEQ ID NO: 7358) |
| KRAS-4168 Target: | 5′-ACAAAAGATTTGTTTTTGTAG-3′ |
| | (SEQ ID NO: 7359) |
| KRAS-4169 Target: | 5′-CAAAAGATTTGTTTTTGTAGA-3′ |
| | (SEQ ID NO: 7360) |
| KRAS-4171 Target: | 5′-AAAGATTTGTTTTTGTAGAGA-3′ |
| | (SEQ ID NO: 7361) |
| KRAS-4172 Target: | 5′-AAGATTTGTTTTTGTAGAGAT-3′ |
| | (SEQ ID NO: 7362) |
| KRAS-4173 Target: | 5′-AGATTTGTTTTTGTAGAGATT-3′ |
| | (SEQ ID NO: 7363) |
| KRAS-4174 Target: | 5′-GATTTGTTTTTGTAGAGATTT-3′ |
| | (SEQ ID NO: 7364) |
| KRAS-4180 Target: | 5′-TTTTTGTAGAGATTTTAAAGG-3′ |
| | (SEQ ID NO: 7365) |
| KRAS-4197 Target: | 5′-AAGGGGGAGAATTCTAGAAAT-3′ |
| | (SEQ ID NO: 7366) |
| KRAS-4199 Target: | 5′-GGGGGAGAATTCTAGAAATAA-3′ |
| | (SEQ ID NO: 7367) |
| KRAS-4200 Target: | 5′-GGGGAGAATTCTAGAAATAAA-3′ |
| | (SEQ ID NO: 7368) |
| KRAS-4201 Target: | 5′-GGGAGAATTCTAGAAATAAAT-3′ |
| | (SEQ ID NO: 7369) |
| KRAS-4202 Target: | 5′-GGAGAATTCTAGAAATAAATG-3′ |
| | (SEQ ID NO: 7370) |
| KRAS-4203 Target: | 5′-GAGAATTCTAGAAATAAATGT-3′ |
| | (SEQ ID NO: 7371) |
| KRAS-4208 Target: | 5′-TTCTAGAAATAAATGTTACCT-3′ |
| | (SEQ ID NO: 7372) |
| KRAS-4209 Target: | 5′-TCTAGAAATAAATGTTACCTA-3′ |
| | (SEQ ID NO: 7373) |
| KRAS-4210 Target: | 5′-CTAGAAATAAATGTTACCTAA-3′ |
| | (SEQ ID NO: 7374) |
| KRAS-4211 Target: | 5′-TAGAAATAAATGTTACCTAAT-3′ |
| | (SEQ ID NO: 7375) |
| KRAS-4212 Target: | 5′-AGAAATAAATGTTACCTAATT-3′ |
| | (SEQ ID NO: 7376) |
| KRAS-4214 Target: | 5′-AAATAAATGTTACCTAATTAT-3′ |
| | (SEQ ID NO: 7377) |
| KRAS-4225 Target: | 5′-ACCTAATTATTACAGCCTTAA-3′ |
| | (SEQ ID NO: 7378) |
| KRAS-4226 Target: | 5′-CCTAATTATTACAGCCTTAAA-3′ |
| | (SEQ ID NO: 7379) |
| KRAS-4240 Target: | 5′-CCTTAAAGACAAAAATCCTTG-3′ |
| | (SEQ ID NO: 7380) |
| KRAS-4243 Target: | 5′-TAAAGACAAAAATCCTTGTTG-3′ |
| | (SEQ ID NO: 7381) |
| KRAS-4255 Target: | 5′-TCCTTGTTGAAGTTTTTTTAA-3′ |
| | (SEQ ID NO: 7382) |
| KRAS-4256 Target: | 5′-CCTTGTTGAAGTTTTTTTAAA-3′ |
| | (SEQ ID NO: 7383) |
| KRAS-4258 Target: | 5′-TTGTTGAAGTTTTTTTAAAAA-3′ |
| | (SEQ ID NO: 7384) |
| KRAS-4259 Target: | 5′-TGTTGAAGTTTTTTTAAAAAA-3′ |
| | (SEQ ID NO: 7385) |
| KRAS-4263 Target: | 5′-GAAGTTTTTTTAAAAAAAGCT-3′ |
| | (SEQ ID NO: 7386) |
| KRAS-4264 Target: | 5′-AAGTTTTTTTAAAAAAAGCTA-3′ |
| | (SEQ ID NO: 7387) |
| KRAS-4265 Target: | 5′-AGTTTTTTTAAAAAAAGCTAA-3′ |
| | (SEQ ID NO: 7388) |
| KRAS-4266 Target: | 5′-GTTTTTTTAAAAAAAGCTAAA-3′ |
| | (SEQ ID NO: 7389) |
| KRAS-4267 Target: | 5′-TTTTTTTAAAAAAAGCTAAAT-3′ |
| | (SEQ ID NO: 7390) |
| KRAS-4271 Target: | 5′-TTTAAAAAAAGCTAAATTACA-3′ |
| | (SEQ ID NO: 7391) |
| KRAS-4273 Target: | 5′-TAAAAAAAGCTAAATTACATA-3′ |
| | (SEQ ID NO: 7392) |
| KRAS-4295 Target: | 5′-ACTTAGGCATTAACATGTTTG-3′ |
| | (SEQ ID NO: 7393) |
| KRAS-4296 Target: | 5′-CTTAGGCATTAACATGTTTGT-3′ |
| | (SEQ ID NO: 7394) |
| KRAS-4327 Target: | 5′-AGCAGACGTATATTGTATCAT-3′ |
| | (SEQ ID NO: 7395) |
| KRAS-4331 Target: | 5′-GACGTATATTGTATCATTTGA-3′ |
| | (SEQ ID NO: 7396) |
| KRAS-4333 Target: | 5′-CGTATATTGTATCATTTGAGT-3′ |
| | (SEQ ID NO: 7397) |
| KRAS-4336 Target: | 5′-ATATTGTATCATTTGAGTGAA-3′ |
| | (SEQ ID NO: 7398) |
| KRAS-4337 Target: | 5′-TATTGTATCATTTGAGTGAAT-3′ |
| | (SEQ ID NO: 7399) |
| KRAS-4338 Target: | 5′-ATTGTATCATTTGAGTGAATG-3′ |
| | (SEQ ID NO: 7400) |
| KRAS-4404 Target: | 5′-ATAGGAATTTAGAACCTAACT-3′ |
| | (SEQ ID NO: 7401) |
| KRAS-4405 Target: | 5′-TAGGAATTTAGAACCTAACTT-3′ |
| | (SEQ ID NO: 7402) |
| KRAS-4409 Target: | 5′-AATTTAGAACCTAACTTTTAT-3′ |
| | (SEQ ID NO: 7403) |
| KRAS-4410 Target: | 5′-ATTTAGAACCTAACTTTTATA-3′ |
| | (SEQ ID NO: 7404) |
| KRAS-4411 Target: | 5′-TTTAGAACCTAACTTTTATAG-3′ |
| | (SEQ ID NO: 7405) |
| KRAS-4412 Target: | 5′-TTAGAACCTAACTTTTATAGG-3′ |
| | (SEQ ID NO: 7406) |
| KRAS-4424 Target: | 5′-TTTTATAGGTTATCAAAACTG-3′ |
| | (SEQ ID NO: 7407) |
| KRAS-4426 Target: | 5′-TTATAGGTTATCAAAACTGTT-3′ |
| | (SEQ ID NO: 7408) |
| KRAS-4460 Target: | 5′-AATTTTGTCCTAATATATACA-3′ |
| | (SEQ ID NO: 7409) |
| KRAS-4461 Target: | 5′-ATTTTGTCCTAATATATACAT-3′ |
| | (SEQ ID NO: 7410) |
| KRAS-4462 Target: | 5′-TTTTGTCCTAATATATACATA-3′ |
| | (SEQ ID NO: 7411) |
| KRAS-4468 Target: | 5′-CCTAATATATACATAGAAACT-3′ |
| | (SEQ ID NO: 7412) |
| KRAS-4473 Target: | 5′-TATATACATAGAAACTTTGTG-3′ |
| | (SEQ ID NO: 7413) |
| KRAS-4516 Target: | 5′-CACAAGTTCATCTCATTTGTA-3′ |
| | (SEQ ID NO: 7414) |
| KRAS-4527 Target: | 5′-CTCATTTGTATTCCATTGATT-3′ |
| | (SEQ ID NO: 7415) |
| KRAS-4528 Target: | 5′-TCATTTGTATTCCATTGATTT-3′ |
| | (SEQ ID NO: 7416) |
| KRAS-4529 Target: | 5′-CATTTGTATTCCATTGATTTT-3′ |
| | (SEQ ID NO: 7417) |
| KRAS-4530 Target: | 5′-ATTTGTATTCCATTGATTTTT-3′ |
| | (SEQ ID NO: 7418) |
| KRAS-4531 Target: | 5′-TTTGTATTCCATTGATTTTTT-3′ |
| | (SEQ ID NO: 7419) |
| KRAS-4532 Target: | 5′-TTGTATTCCATTGATTTTTTT-3′ |
| | (SEQ ID NO: 7420) |
| KRAS-4533 Target: | 5′-TGTATTCCATTGATTTTTTTT-3′ |
| | (SEQ ID NO: 7421) |
| KRAS-4540 Target: | 5′-CATTGATTTTTTTTTTCTTCT-3′ |
| | (SEQ ID NO: 7422) |
| KRAS-4541 Target: | 5′-ATTGATTTTTTTTTTCTTCTA-3′ |
| | (SEQ ID NO: 7423) |
| KRAS-4545 Target: | 5′-ATTTTTTTTTTCTTCTAAACA-3′ |
| | (SEQ ID NO: 7424) |
| KRAS-4546 Target: | 5′5′-TTTTTTTTTTCTTCTAAACAT-3′ |
| | (SEQ ID NO: 7425) |
| KRAS-4547 Target: | 5′5′-TTTTTTTTTCTTCTAAACATT-3′ |
| | (SEQ ID NO: 7426) |
| KRAS-4548 Target: | 5′5′ TTTTTTTTCTTCTAAACATTT 3′ |
| | (SEQ ID NO: 7427) |
| KRAS-4549 Target: | 5′5′-TTTTTTTCTTCTAAACATTTT 3′ |
| | (SEQ ID NO: 7428) |
| KRAS-4562 Target: | 5′-AACATTTTTTCTTCAAACAGT-3′ |
| | (SEQ ID NO: 7429) |
| KRAS-4563 Target: | 5′-ACATTTTTTCTTCAAACAGTA-3′ |
| | (SEQ ID NO: 7430) |
| KRAS-4564 Target: | 5′-CATTTTTTCTTCAAACAGTAT-3′ |
| | (SEQ ID NO: 7431) |
| KRAS-4565 Target: | 5′-ATTTTTTCTTCAAACAGTATA-3′ |
| | (SEQ ID NO: 7432) |
| KRAS-4566 Target: | 5′-TTTTTTCTTCAAACAGTATAT-3 ′ |
| | (SEQ ID NO: 7433) |
| KRAS-4573 Target: | 5′-TTCAAACAGTATATAACTTTT-3′ |
| | (SEQ ID NO: 7434) |
| KRAS-4578 Target: | 5′-ACAGTATATAACTTTTTTTAG-3′ |
| | (SEQ ID NO: 7435) |
| KRAS-4579 Target: | 5′-CAGTATATAACTTTTTTTAGG-3′ |
| | (SEQ ID NO: 7436) |
| KRAS-4580 Target: | 5′-AGTATATAACTTTTTTTAGGG-3′ |
| | (SEQ ID NO: 7437) |
| KRAS-4581 Target: | 5′-GTATATAACTTTTTTTAGGGG-3′ |
| | (SEQ ID NO: 7438) |
| KRAS-4587 Target: | 5′-AACTTTTTTTAGGGGATTTTT-3′ |
| | (SEQ ID NO: 7439) |
| KRAS-4588 Target: | 5′-ACTTTTTTTAGGGGATTTTTT-3′ |
| | (SEQ ID NO: 7440) |
| KRAS-4599 Target: | 5′-GGGATTTTTTTTTAGACAGCA-3′ |
| | (SEQ ID NO: 7441) |
| KRAS-4600 Target: | 5′-GGATTTTTTTTTAGACAGCAA-3′ |
| | (SEQ ID NO: 7442) |
| KRAS-4601 Target: | 5′-GATTTTTTTTTAGACAGCAAA-3′ |
| | (SEQ ID NO: 7443) |
| KRAS-4629 Target: | 5′-TGAAGATTTCCATTTGTCAAA-3′ |
| | (SEQ ID NO: 7444) |
| KRAS-4630 Target: | 5′-GAAGATTTCCATTTGTCAAAA-3′ |
| | (SEQ ID NO: 7445) |
| KRAS-4631 Target: | 5′-AAGATTTCCATTTGTCAAAAA-3′ |
| | (SEQ ID NO: 7446) |
| KRAS-4632 Target: | 5′-AGATTTCCATTTGTCAAAAAG-3′ |
| | (SEQ ID NO: 7447) |
| KRAS-4637 Target: | 5′-TCCATTTGTCAAAAAGTAATG-3′ |
| | (SEQ ID NO: 7448) |
| KRAS-4638 Target: | 5′-CCATTTGTCAAAAAGTAATGA-3′ |
| | (SEQ ID NO: 7449) |
| KRAS-4639 Target: | 5′-CATTTGTCAAAAAGTAATGAT-3′ |
| | (SEQ ID NO: 7450) |
| KRAS-4644 Target: | 5′-GTCAAAAAGTAATGATTTCTT-3′ |
| | (SEQ ID NO: 7451) |
| KRAS-4645 Target: | 5′-TCAAAAAGTAATGATTTCTTG-3′ |
| | (SEQ ID NO: 7452) |
| KRAS-4646 Target: | 5′-CAAAAAGTAATGATTTCTTGA-3′ |
| | (SEQ ID NO: 7453) |
| KRAS-4647 Target: | 5′-AAAAAGTAATGATTTCTTGAT-3′ |
| | (SEQ ID NO: 7454) |
| KRAS-4649 Target: | 5′-AAAGTAATGATTTCTTGATAA-3′ |
| | (SEQ ID NO: 7455) |
| KRAS-4651 Target: | 5′-AGTAATGATTTCTTGATAATT-3′ |
| | (SEQ ID NO: 7456) |
| KRAS-4652 Target: | 5′-GTAATGATTTCTTGATAATTG-3′ |
| | (SEQ ID NO: 7457) |
| KRAS-4654 Target: | 5′-AATGATTTCTTGATAATTGTG-3′ |
| | (SEQ ID NO: 7458) |
| KRAS-4655 Target: | 5′-ATGATTTCTTGATAATTGTGT-3′ |
| | (SEQ ID NO: 7459) |
| KRAS-4660 Target: | 5′-TTCTTGATAATTGTGTAGTAA-3′ |
| | (SEQ ID NO: 7460) |
| KRAS-4661 Target: | 5′-TCTTGATAATTGTGTAGTAAT-3′ |
| | (SEQ ID NO: 7461) |
| KRAS-4662 Target: | 5′-CTTGATAATTGTGTAGTAATG-3′ |
| | (SEQ ID NO: 7462) |
| KRAS-4664 Target: | 5′-TGATAATTGTGTAGTAATGTT-3′ |
| | (SEQ ID NO: 7463) |
| KRAS-4667 Target: | 5′-TAATTGTGTAGTAATGTTTTT-3′ |
| | (SEQ ID NO: 7464) |
| KRAS-4669 Target: | 5′-ATTGTGTAGTAATGTTTTTTA-3′ |
| | (SEQ ID NO: 7465) |
| KRAS-4670 Target: | 5′-TTGTGTAGTAATGTTTTTTAG-3′ |
| | (SEQ ID NO: 7466) |
| KRAS-4704 Target: | 5′-CCTTAAAGCTGAATTTATATT-3′ |
| | (SEQ ID NO: 7467) |
| KRAS-4706 Target: | 5′-TTAAAGCTGAATTTATATTTA-3′ |
| | (SEQ ID NO: 7468) |
| KRAS-4715 Target: | 5′-AATTTATATTTAGTAACTTCT-3′ |
| | (SEQ ID NO: 7469) |
| KRAS-4716 Target: | 5′-ATTTATATTTAGTAACTTCTG-3′ |
| | (SEQ ID NO: 7470) |
| KRAS-4717 Target: | 5′-TTTATATTTAGTAACTTCTGT-3′ |
| | (SEQ ID NO: 7471) |
| KRAS-4722 Target: | 5′-ATTTAGTAACTTCTGTGTTAA-3′ |
| | (SEQ ID NO: 7472) |
| KRAS-4773 Target: | 5′-ACTGAATAGCTGTCATAAAAT-3′ |
| | (SEQ ID NO: 7473) |
| KRAS-4774 Target: | 5′-CTGAATAGCTGTCATAAAATG-3′ |
| | (SEQ ID NO: 7474) |
| KRAS-4788 Target: | 5′-TAAAATGAAACTTTCTTTCTA-3′ |
| | (SEQ ID NO: 7475) |
| KRAS-4789 Target: | 5′-AAAATGAAACTTTCTTTCTAA-3′ |
| | (SEQ ID NO: 7476) |
| KRAS-4790 Target: | 5′-AAATGAAACTTTCTTTCTAAA-3′ |
| | (SEQ ID NO: 7477) |
| KRAS-4792 Target: | 5′-ATGAAACTTTCTTTCTAAAGA-3′ |
| | (SEQ ID NO: 7478) |
| KRAS-4796 Target: | 5′-AACTTTCTTTCTAAAGAAAGA-3′ |
| | (SEQ ID NO: 7479) |
| KRAS-4821 Target: | 5′-CACATGAGTTCTTGAAGAATA-3′ |
| | (SEQ ID NO: 7480) |
| KRAS-4830 Target: | 5′-TCTTGAAGAATAGTCATAACT-3′ |
| | (SEQ ID NO: 7481) |
| KRAS-4831 Target: | 5′-CTTGAAGAATAGTCATAACTA-3′ |
| | (SEQ ID NO: 7482) |
| KRAS-4832 Target: | 5′-TTGAAGAATAGTCATAACTAG-3′ |
| | (SEQ ID NO: 7483) |
| KRAS-4835 Target: | 5′-AAGAATAGTCATAACTAGATT-3′ |
| | (SEQ ID NO: 7484) |
| KRAS-4836 Target: | 5′-AGAATAGTCATAACTAGATTA-3′ |
| | (SEQ ID NO: 7485) |
| KRAS-4837 Target: | 5′-GAATAGTCATAACTAGATTAA-3′ |
| | (SEQ ID NO: 7486) |
| KRAS-4838 Target: | 5′-AATAGTCATAACTAGATTAAG-3′ |
| | (SEQ ID NO: 7487) |
| KRAS-4842 Target: | 5′-GTCATAACTAGATTAAGATCT-3′ |
| | (SEQ ID NO: 7488) |
| KRAS-4848 Target: | 5′-ACTAGATTAAGATCTGTGTTT-3′ |
| | (SEQ ID NO: 7489) |
| KRAS-4850 Target: | 5′-TAGATTAAGATCTGTGTTTTA-3′ |
| | (SEQ ID NO: 7490) |
| KRAS-4851 Target: | 5′-AGATTAAGATCTGTGTTTTAG-3′ |
| | (SEQ ID NO: 7491) |
| KRAS-4853 Target: | 5′-ATTAAGATCTGTGTTTTAGTT-3′ |
| | (SEQ ID NO: 7492) |
| KRAS-4860 Target: | 5′-TCTGTGTTTTAGTTTAATAGT-3′ |
| | (SEQ ID NO: 7493) |
| KRAS-4861 Target: | 5′-CTGTGTTTTAGTTTAATAGTT-3′ |
| | (SEQ ID NO: 7494) |
| KRAS-4863 Target: | 5′-GTGTTTTAGTTTAATAGTTTG-3′ |
| | (SEQ ID NO: 7495) |
| KRAS-4865 Target: | 5′-GTTTTAGTTTAATAGTTTGAA-3′ |
| | (SEQ ID NO: 7496) |
| KRAS-4866 Target: | 5′-TTTTAGTTTAATAGTTTGAAG-3′ |
| | (SEQ ID NO: 7497) |
| KRAS-4892 Target: | 5′-GTTTGGGATAATGATAGGTAA-3′ |
| | (SEQ ID NO: 7498) |
| KRAS-4894 Target: | 5′-TTGGGATAATGATAGGTAATT-3′ |
| | (SEQ ID NO: 7499) |
| KRAS-4897 Target: | 5′-GGATAATGATAGGTAATTTAG-3′ |
| | (SEQ ID NO: 7500) |
| KRAS-4898 Target: | 5′-GATAATGATAGGTAATTTAGA-3′ |
| | (SEQ ID NO: 7501) |
| KRAS-4901 Target: | 5′-AATGATAGGTAATTTAGATGA-3′ |
| | (SEQ ID NO: 7502) |
| KRAS-4902 Target: | 5′-ATGATAGGTAATTTAGATGAA-3′ |
| | (SEQ ID NO: 7503) |
| KRAS-4907 Target: | 5′-AGGTAATTTAGATGAATTTAG-3′ |
| | (SEQ ID NO: 7504) |
| KRAS-4909 Target: | 5′-GTAATTTAGATGAATTTAGGG-3′ |
| | (SEQ ID NO: 7505) |
| KRAS-4916 Target: | 5′-AGATGAATTTAGGGGAAAAAA-3′ |
| | (SEQ ID NO: 7506) |
| KRAS-4917 Target: | 5′-GATGAATTTAGGGGAAAAAAA-3′ |
| | (SEQ ID NO: 7507) |
| KRAS-4928 Target: | 5′-GGGAAAAAAAAGTTATCTGCA-3′ |
| | (SEQ ID NO: 7508) |
| KRAS-4929 Target: | 5′-GGAAAAAAAAGTTATCTGCAG-3′ |
| | (SEQ ID NO: 7509) |
| KRAS-4934 Target: | 5′-AAAAAGTTATCTGCAGATATG-3′ |
| | (SEQ ID NO: 7510) |
| KRAS-5035 Target: | 5′-GTCTTGTGTTTTCATGTTGAA-3′ |
| | (SEQ ID NO: 7511) |
| KRAS-5036 Target: | 5′-TCTTGTGTTTTCATGTTGAAA-3′ |
| | (SEQ ID NO: 7512) |
| KRAS-5037 Target: | 5′-CTTGTGTTTTCATGTTGAAAA-3′ |
| | (SEQ ID NO: 7513) |
| KRAS-5047 Target: | 5′-CATGTTGAAAATACTTTTGCA-3′ |
| | (SEQ ID NO: 7514) |
| KRAS-5048 Target: | 5′-ATGTTGAAAATACTTTTGCAT-3′ |
| | (SEQ ID NO: 7515) |
| KRAS-5049 Target: | 5′-TGTTGAAAATACTTTTGCATT-3′ |
| | (SEQ ID NO: 7516) |
| KRAS-5050 Target: | 5′-GTTGAAAATACTTTTGCATTT-3′ |
| | (SEQ ID NO: 7517) |
| KRAS-5060 Target: | 5′-CTTTTGCATTTTTCCTTTGAG-3′ |
| | (SEQ ID NO: 7518) |
| KRAS-5077 Target: | 5′-TGAGTGCCAATTTCTTACTAG-3′ |
| | (SEQ ID NO: 7519) |
| KRAS-5082 Target: | 5′-GCCAATTTCTTACTAGTACTA-3′ |
| | (SEQ ID NO: 7520) |
| KRAS-5083 Target: | 5′-CCAATTTCTTACTAGTACTAT-3′ |
| | (SEQ ID NO: 7521) |
| KRAS-5092 Target: | 5′-TACTAGTACTATTTCTTAATG-3′ |
| | (SEQ ID NO: 7522) |
| KRAS-5093 Target: | 5′-ACTAGTACTATTTCTTAATGT-3′ |
| | (SEQ ID NO: 7523) |
| KRAS-5098 Target: | 5′-TACTATTTCTTAATGTAACAT-3′ |
| | (SEQ ID NO: 7524) |
| KRAS-5099 Target: | 5′-ACTATTTCTTAATGTAACATG-3′ |
| | (SEQ ID NO: 7525) |
| KRAS-5100 Target: | 5′-CTATTTCTTAATGTAACATGT-3′ |
| | (SEQ ID NO: 7526) |
| KRAS-5107 Target: | 5′-TTAATGTAACATGTTTACCTG-3′ |
| | (SEQ ID NO: 7527) |
| KRAS-5124 Target: | 5′-CCTGGAATGTATTTTAACTAT-3′ |
| | (SEQ ID NO: 7528) |
| KRAS-5126 Target: | 5′-TGGAATGTATTTTAACTATTT-3′ |
| | (SEQ ID NO: 7529) |
| KRAS-5127 Target: | 5′-GGAATGTATTTTAACTATTTT-3′ |
| | (SEQ ID NO: 7530) |
| KRAS-5128 Target: | 5′-GAATGTATTTTAACTATTTTT-3′ |
| | (SEQ ID NO: 7531) |
| KRAS-5129 Target: | 5′-AATGTATTTTAACTATTTTTG-3′ |
| | (SEQ ID NO: 7532) |
| KRAS-5131 Target: | 5′-TGTATTTTAACTATTTTTGTA-3′ |
| | (SEQ ID NO: 7533) |
| KRAS-5133 Target: | 5′-TATTTTAACTATTTTTGTATA-3′ |
| | (SEQ ID NO: 7534) |
| KRAS-5134 Target: | 5′-ATTTTAACTATTTTTGTATAG-3′ |
| | (SEQ ID NO: 7535) |
| KRAS-5135 Target: | 5′-TTTTAACTATTTTTGTATAGT-3′ |
| | (SEQ ID NO: 7536) |
| KRAS-5142 Target: | 5′-TATTTTTGTATAGTGTAAACT-3′ |
| | (SEQ ID NO: 7537) |
| KRAS-5143 Target: | 5′-ATTTTTGTATAGTGTAAACTG-3′ |
| | (SEQ ID NO: 7538) |
| KRAS-5144 Target: | 5′-TTTTTGTATAGTGTAAACTGA-3′ |
| | (SEQ ID NO: 7539) |
| KRAS-5159 Target: | 5′-AACTGAAACATGCACATTTTG-3′ |
| | (SEQ ID NO: 7540) |
| KRAS-5165 Target: | 5′-AACATGCACATTTTGTACATT-3′ |
| | (SEQ ID NO: 7541) |
| KRAS-5218 Target: | 5′-TCCAGTTGTTTTCCATCATTT-3′ |
| | (SEQ ID NO: 7542) |
| KRAS-5220 Target: | 5′-CAGTTGTTTTCCATCATTTGG-3′ |
| | (SEQ ID NO: 7543) |
| KRAS-5257 Target: | 5′-ATGTTGGTCATATCAAACATT-3′ |
| | (SEQ ID NO: 7544) |
| KRAS-5258 Target | |
| KRAS-5259 Target: | 5′-GTTGGTCATATCAAACATTAA-3′ |
| | (SEQ ID NO: 7546) |
| KRAS-5263 Target: | 5′-GTCATATCAAACATTAAAAAT-3′ |
| | (SEQ ID NO: 7547) |
| KRAS-5279 Target: | 5′-AAAATGACCACTCTTTTAATT-3′ |
| | (SEQ ID NO: 7548) |
| KRAS-5280 Target: | 5′-AAATGACCACTCTTTTAATTG-3′ |
| | (SEQ ID NO: 7549) |
| KRAS-5289 Target: | 5′-CTCTTTTAATTGAAATTAACT-3′ |
| | (SEQ ID NO: 7550) |
| KRAS-5290 Target: | 5′-TCTTTTAATTGAAATTAACTT-3′ |
| | (SEQ ID NO: 7551) |
| KRAS-5292 Target: | 5′-TTTTAATTGAAATTAACTTTT-3′ |
| | (SEQ ID NO: 7552) |
| KRAS-5294 Target: | 5′-TTAATTGAAATTAACTTTTAA-3′ |
| | (SEQ ID NO: 7553) |
| KRAS-5295 Target: | 5′-TAATTGAAATTAACTTTTAAA-3′ |
| | (SEQ ID NO: 7554) |
| KRAS-5296 Target: | 5′-AATTGAAATTAACTTTTAAAT-3′ |
| | (SEQ ID NO: 7555) |
| KRAS-5297 Target: | 5′-ATTGAAATTAACTTTTAAATG-3′ |
| | (SEQ ID NO: 7556) |
| KRAS-5298 Target: | 5′-TTGAAATTAACTTTTAAATGT-3′ |
| | (SEQ ID NO: 7557) |
| KRAS-5299 Target: | 5′-TGAAATTAACTTTTAAATGTT-3′ |
| | (SEQ ID NO: 7558) |
| KRAS-5302 Target: | 5′-AATTAACTTTTAAATGTTTAT-3′ |
| | (SEQ ID NO: 7559) |
| KRAS-5306 Target: | 5′-AACTTTTAAATGTTTATAGGA-3′ |
| | (SEQ ID NO: 7560) |
| KRAS-5310 Target: | 5′-TTTAAATGTTTATAGGAGTAT-3′ |
| | (SEQ ID NO: 7561) |
| KRAS-5311 Target: | 5′-TTAAATGTTTATAGGAGTATG-3′ |
| | (SEQ ID NO: 7562) |
| KRAS-5333 Target: | 5′-GCTGTGAAGTGATCTAAAATT-3′ |
| | (SEQ ID NO: 7563) |
| KRAS-5335 Target: | 5′-TGTGAAGTGATCTAAAATTTG-3′ |
| | (SEQ ID NO: 7564) |
| KRAS-5336 Target: | 5′-GTGAAGTGATCTAAAATTTGT-3′ |
| | (SEQ ID NO: 7565) |
| KRAS-5337 Target: | 5′-TGAAGTGATCTAAAATTTGTA-3′ |
| | (SEQ ID NO: 7566) |
| KRAS-5338 Target: | 5′-GAAGTGATCTAAAATTTGTAA-3′ |
| | (SEQ ID NO: 7567) |
| KRAS-5339 Target: | 5′-AAGTGATCTAAAATTTGTAAT-3′ |
| | (SEQ ID NO: 7568) |
| KRAS-5340 Target: | 5′-AGTGATCTAAAATTTGTAATA-3′ |
| | (SEQ ID NO: 7569) |
| KRAS-5344 Target: | 5′-ATCTAAAATTTGTAATATTTT-3′ |
| | (SEQ ID NO: 7570) |
| KRAS-5345 Target: | 5′-TCTAAAATTTGTAATATTTTT-3′ |
| | (SEQ ID NO: 7571) |
| KRAS-5349 Target: | 5′-AAATTTGTAATATTTTTGTCA-3′ |
| | (SEQ ID NO: 7572) |
| KRAS-5350 Target: | 5′-AATTTGTAATATTTTTGTCAT-3′ |
| | (SEQ ID NO: 7573) |
| KRAS-5351 Target: | 5′-ATTTGTAATATTTTTGTCATG-3′ |
| | (SEQ ID NO: 7574) |
| KRAS-5355 Target: | 5′-GTAATATTTTTGTCATGAACT-3′ |
| | (SEQ ID NO: 7575) |
| KRAS-5356 Target: | 5′-TAATATTTTTGTCATGAACTG-3′ |
| | (SEQ ID NO: 7576) |
| KRAS-5372 Target: | 5′-AACTGTACTACTCCTAATTAT-3′ |
| | (SEQ ID NO: 7577) |
| KRAS-5373 Target: | 5′-ACTGTACTACTCCTAATTATT-3′ |
| | (SEQ ID NO: 7578) |
| KRAS-5383 Target: | 5′-TCCTAATTATTGTAATGTAAT-3′ |
| | (SEQ ID NO: 7579) |
| KRAS-5384 Target: | 5′-CCTAATTATTGTAATGTAATA-3′ |
| | (SEQ ID NO: 7580) |
| KRAS-5386 Target: | 5′-TAATTATTGTAATGTAATAAA-3′ |
| | (SEQ ID NO: 7581) |
| KRAS-5388 Target: | 5′-ATTATTGTAATGTAATAAAAA-3′ |
| | (SEQ ID NO: 7582) |
| KRAS-5389 Target: | 5′-TTATTGTAATGTAATAAAAAT-3′ |
| | (SEQ ID NO: 7583) |
| KRAS-5391 Target: | 5′-ATTGTAATGTAATAAAAATAG-3′ |
| | (SEQ ID NO: 7584) |
| KRAS-5392 Target: | 5′-TTGTAATGTAATAAAAATAGT-3′ |
| | (SEQ ID NO: 7585) |
| KRAS-5396 Target: | 5′-AATGTAATAAAAATAGTTACA-3′ |
| | (SEQ ID NO: 7586) |
| KRAS-5397 Target: | 5′-ATGTAATAAAAATAGTTACAG-3′ |
| | (SEQ ID NO: 7587) |
| KRAS-5398 Target: | 5′-TGTAATAAAAATAGTTACAGT-3′ |
| | (SEQ ID NO: 7588) |
| KRAS-5406 Target: | 5′-AAATAGTTACAGTGACAAAAA-3′ |
| | (SEQ ID NO: 7589) |
| KRAS-5407 Target: | 5′-AATAGTTACAGTGACAAAAAA-3′ |
| | (SEQ ID NO: 7590) |
| KRAS-5409 Target: | 5′-TAGTTACAGTGACAAAAAAAA-3′ |
| | (SEQ ID NO: 7591) |
| KRAS-172 Target: | 5′4 CCTGCTGAAAATGACTGAATA-3′ |
| | (SEQ ID 1 40: 7592) |
| KRAS-178 Target: | 5 GAAAATGACTGAATATAAACT-3′ |
| | (SEQ ID 1 40: 7593) |
| KRAS-182 Target: | 5′4 ATGACTGAATATAAACTTGTG-3′ |
| | (SEQ ID T40: 7594) |
| KRAS-244 Target: | 5′4 ACAGCTAATTCAGAATCATTT-3′ |
| | (SEQ ID T40: 7595) |
| KRAS-268 Target: | 5 GGACGAATATGATCCAACAAT-3′ |
| | (SEQ ID T40: 7596) |
| KRAS-304 Target: | 5′-GAAGCAAGTAGTAATTGATGG-3′ |
| | (SEQ ID NO: 7597) |
| KRAS-404 Target: | 5′-GGGGAGGGCTTTCTTTGTGTA-3′ |
| | (SEQ ID NO: 7598) |
| KRAS-413 Target: | 5′-TTTCTTTGTGTATTTGCCATA-3′ |
| | (SEQ ID NO: 7599) |
| KRAS-414 Target: | 5′-TTCTTTGTGTATTTGCCATAA-3′ |
| | (SEQ ID NO: 7600) |
| KRAS-415 Target: | 5′-TCTTTGTGTATTTGCCATAAA-3′ |
| | (SEQ ID NO: 7601) |
| KRAS-416 Target: | 5′-CTTTGTGTATTTGCCATAAAT-3′ |
| | (SEQ ID NO: 7602) |
| KRAS-420 Target: | 5′-GTGTATTTGCCATAAATAATA-3′ |
| | (SEQ ID NO: 7603) |
| KRAS-421 Target: | 5′-TGTATTTGCCATAAATAATAC-3′ |
| | (SEQ ID NO: 7604) |
| KRAS-427 Target: | 5′-TGCCATAAATAATACTAAATC-3′ |
| | (SEQ ID NO: 7605) |
| KRAS-428 Target: | 5′-GCCATAAATAATACTAAATCA-3′ |
| | (SEQ ID NO: 7606) |
| KRAS-430 Target: | 5′-CATAAATAATACTAAATCATT-3′ |
| | (SEQ ID NO: 7607) |
| KRAS-431 Target: | 5′-ATAAATAATACTAAATCATTT-3′ |
| | (SEQ ID NO: 7608) |
| KRAS-432 Target: | 5′-TAAATAATACTAAATCATTTG-3′ |
| | (SEQ ID NO: 7609) |
| KRAS-433 Target: | 5′-AAATAATACTAAATCATTTGA-3′ |
| | (SEQ ID NO: 7610) |
| KRAS-446 Target: | 5′-TCATTTGAAGATATTCACCAT-3′ |
| | (SEQ ID NO: 7611) |
| KRAS-448 Target: | 5′-ATTTGAAGATATTCACCATTA-3′ |
| | (SEQ ID NO: 7612) |
| KRAS-449 Target: | 5′-TTTGAAGATATTCACCATTAT-3′ |
| | (SEQ ID NO: 7613) |
| KRAS-450 Target: | 5′-TTGAAGATATTCACCATTATA-3′ |
| | (SEQ ID NO: 7614) |
| KRAS-451 Target: | 5′-TGAAGATATTCACCATTATAG-3′ |
| | (SEQ ID NO: 7615) |
| KRAS-461 Target: | 5′-CACCATTATAGAGAACAAATT-3′ |
| | (SEQ ID NO: 7616) |
| KRAS-463 Target: | 5′-CCATTATAGAGAACAAATTAA-3′ |
| | (SEQ ID NO: 7617) |
| KRAS-464 Target: | 5′-CATTATAGAGAACAAATTAAA-3′ |
| | (SEQ ID NO: 7618) |
| KRAS-465 Target: | 5′-ATTATAGAGAACAAATTAAAA-3′ |
| | (SEQ ID NO: 7619) |
| KRAS-466 Target: | 5′-TTATAGAGAACAAATTAAAAG-3′ |
| | (SEQ ID NO: 7620) |
| KRAS-516 Target: | 5′-TCCTAGTAGGAAATAAATGTG-3′ |
| | (SEQ ID NO: 7621) |
| KRAS-517 Target: | 5′-CCTAGTAGGAAATAAATGTGA-3′ |
| | (SEQ ID NO: 7622) |
| KRAS-581 Target: | 5′-GCAAGAAGTTATGGAATTCCT-3′ |
| | (SEQ ID NO: 7623) |
| KRAS-584 Target: | 5′-AGAAGTTATGGAATTCCTTTT-3′ |
| | (SEQ ID NO: 7624) |
| KRAS-585 Target: | 5′-GAAGTTATGGAATTCCTTTTA-3′ |
| | (SEQ ID NO: 7625) |
| KRAS-586 Target: | 5′-AAGTTATGGAATTCCTTTTAT-3′ |
| | (SEQ ID NO: 7626) |
| KRAS-587 Target: | 5′-AGTTATGGAATTCCTTTTATT-3′ |
| | (SEQ ID NO: 7627) |
| KRAS-634 Target: | 5′-AGTGGAGGATGCTTTTTATAC-3′ |
| | (SEQ ID NO: 7628) |
| KRAS-636 Target: | 5′-TGGAGGATGCTTTTTATACAT-3′ |
| | (SEQ ID NO: 7629) |
| KRAS-676 Target: | 5′-ATACAGATTGAAAAAAATCAG-3′ |
| | (SEQ ID NO: 7630) |
| KRAS-677 Target: | 5′-TACAGATTGAAAAAAATCAGC-3′ |
| | (SEQ ID NO: 7631) |
| KRAS-679 Target: | 5′-CAGATTGAAAAAAATCAGCAA-3′ |
| | (SEQ ID NO: 7632) |
| KRAS-680 Target: | 5′-AGATTGAAAAAAATCAGCAAA-3′ |
| | (SEQ ID NO: 7633) |
| KRAS-681 Target: | 5′-GATTGAAAAAAATCAGCAAAG-3′ |
| | (SEQ ID NO: 7634) |
| KRAS-682 Target: | 5′-ATTGAAAAAAATCAGCAAAGA-3′ |
| | (SEQ ID NO: 7635) |
| KRAS-710 Target: | 5′-ACTCCTGGCTGTGTGAAAATT-3′ |
| | (SEQ ID NO: 7636) |
| KRAS-714 Target: | 5′-CTGGCTGTGTGAAAATTAAAA-3′ |
| | (SEQ ID NO: 7637) |
| KRAS-718 Target: | 5′-CTGTGTGAAAATTAAAAAATG-3′ |
| | (SEQ ID NO: 7638) |
| KRAS-719 Target: | 5′-TGTGTGAAAATTAAAAAATGC-3′ |
| | (SEQ ID NO: 7639) |
| KRAS-720 Target: | 5′-GTGTGAAAATTAAAAAATGCA-3′ |
| | (SEQ ID NO: 7640) |
| KRAS-721 Target: | 5′-TGTGAAAATTAAAAAATGCAT-3′ |
| | (SEQ ID NO: 7641) |
| KRAS-723 Target: | 5′-TGAAAATTAAAAAATGCATTA-3′ |
| | (SEQ ID NO: 7642) |
| KRAS-724 Target: | 5′-GAAAATTAAAAAATGCATTAT-3′ |
| | (SEQ ID NO: 7643) |
| KRAS-725 Target: | 5′-AAAATTAAAAAATGCATTATA-3′ |
| | (SEQ ID NO: 7644) |
| KRAS-726 Target: | 5′-AAATTAAAAAATGCATTATAA-3′ |
| | (SEQ ID NO: 7645) |
| KRAS-728 Target: | 5′-ATTAAAAAATGCATTATAATG-3′ |
| | (SEQ ID NO: 7646) |
| KRAS-735 Target: | 5′-AATGCATTATAATGTAATCTG-3′ |
| | (SEQ ID NO: 7647) |
| KRAS-782 Target: | 5′-AGTTCGAGAAATTCGAAAACA-3′ |
| | (SEQ ID NO: 7648) |
| KRAS-783 Target: | 5′-GTTCGAGAAATTCGAAAACAT-3′ |
| | (SEQ ID NO: 7649) |
| KRAS-784 Target: | 5′-TTCGAGAAATTCGAAAACATA-3′ |
| | (SEQ ID NO: 7650) |
| KRAS-787 Target: | 5′-GAGAAATTCGAAAACATAAAG-3′ |
| | (SEQ ID NO: 7651) |
| KRAS-792 Target: | 5′-ATTCGAAAACATAAAGAAAAG-3′ |
| | (SEQ ID NO: 7652) |
| KRAS-793 Target: | 5′-TTCGAAAACATAAAGAAAAGA-3′ |
| | (SEQ ID NO: 7653) |
| KRAS-817 Target: | 5′-GCAAAGATGGTAAAAAGAAGA-3′ |
| | (SEQ ID NO: 7654) |
| KRAS-818 Target: | 5′-CAAAGATGGTAAAAAGAAGAA-3′ |
| | (SEQ ID NO: 7655) |
| KRAS-820 Target: | 5′-AAGATGGTAAAAAGAAGAAAA-3′ |
| | (SEQ ID NO: 7656) |
| KRAS-821 Target: | 5′-AGATGGTAAAAAGAAGAAAAA-3′ |
| | (SEQ ID NO: 7657) |
| KRAS-826 Target: | 5′-GTAAAAAGAAGAAAAAGAAGT-3′ |
| | (SEQ ID NO: 7658) |
| KRAS-827 Target: | 5′-TAAAAAGAAGAAAAAGAAGTC-3′ |
| | (SEQ ID NO: 7659) |
| KRAS-828 Target: | 5′-AAAAAGAAGAAAAAGAAGTCA-3′ |
| | (SEQ ID NO: 7660) |
| KRAS-844 Target: | 5′-AGTCAAAGACAAAGTGTGTAA-3′ |
| | (SEQ ID NO: 7661) |
| KRAS-845 Target: | 5′-GTCAAAGACAAAGTGTGTAAT-3′ |
| | (SEQ ID NO: 7662) |
| KRAS-849 Target: | 5′-AAGACAAAGTGTGTAATTATG-3′ |
| | (SEQ ID NO: 7663) |
| KRAS-851 Target: | 5′-GACAAAGTGTGTAATTATGTA-3′ |
| | (SEQ ID NO: 7664) |
| KRAS-855 Target: | 5′-AAGTGTGTAATTATGTAAATA-3′ |
| | (SEQ ID NO: 7665) |
| KRAS-857 Target: | 5′-GTGTGTAATTATGTAAATACA-3′ |
| | (SEQ ID NO: 7666) |
| KRAS-859 Target: | 5′-GTGTAATTATGTAAATACAAT-3′ |
| | (SEQ ID NO: 7667) |
| KRAS-860 Target: | 5′-TGTAATTATGTAAATACAATT-3′ |
| | (SEQ ID NO: 7668) |
| KRAS-864 Target: | 5′-ATTATGTAAATACAATTTGTA-3′ |
| | (SEQ ID NO: 7669) |
| KRAS-865 Target: | 5′-TTATGTAAATACAATTTGTAC-3′ |
| | (SEQ ID NO: 7670) |
| KRAS-866 Target: | 5′-TATGTAAATACAATTTGTACT-3′ |
| | (SEQ ID NO: 7671) |
| KRAS-867 Target: | 5′-ATGTAAATACAATTTGTACTT-3′ |
| | (SEQ ID NO: 7672) |
| KRAS-873 Target: | 5′-ATACAATTTGTACTTTTTTCT-3′ |
| | (SEQ ID NO: 7673) |
| KRAS-874 Target: | 5′-TACAATTTGTACTTTTTTCTT-3′ |
| | (SEQ ID NO: 7674) |
| KRAS-899 Target: | 5′-CATACTAGTACAAGTGGTAAT-3′ |
| | (SEQ ID NO: 7675) |
| KRAS-900 Target: | 5′-ATACTAGTACAAGTGGTAATT-3′ |
| | (SEQ ID NO: 7676) |
| KRAS-906 Target: | 5′-GTACAAGTGGTAATTTTTGTA-3′ |
| | (SEQ ID NO: 7677) |
| KRAS-907 Target: | 5′-TACAAGTGGTAATTTTTGTAC-3′ |
| | (SEQ ID NO: 7678) |
| KRAS-914 Target: | 5′-GGTAATTTTTGTACATTACAC-3′ |
| | (SEQ ID NO: 7679) |
| KRAS-915 Target: | 5′-GTAATTTTTGTACATTACACT-3′ |
| | (SEQ ID NO: 7680) |
| KRAS-916 Target: | 5′-TAATTTTTGTACATTACACTA-3′ |
| | (SEQ ID NO: 7681) |
| KRAS-917 Target: | 5′-AATTTTTGTACATTACACTAA-3′ |
| | (SEQ ID NO: 7682) |
| KRAS-918 Target: | 5′-ATTTTTGTACATTACACTAAA-3′ |
| | (SEQ ID NO: 7683) |
| KRAS-930 Target: | 5′-TACACTAAATTATTAGCATTT-3′ |
| | (SEQ ID NO: 7684) |
| KRAS-932 Target: | 5′-CACTAAATTATTAGCATTTGT-3′ |
| | (SEQ ID NO: 7685) |
| KRAS-933 Target: | 5′-ACTAAATTATTAGCATTTGTT-3′ |
| | (SEQ ID NO: 7686) |
| KRAS-938 Target: | 5′-ATTATTAGCATTTGTTTTAGC-3′ |
| | (SEQ ID NO: 7687) |
| KRAS-944 Target: | 5′-AGCATTTGTTTTAGCATTACC-3′ |
| | (SEQ ID NO: 7688) |
| KRAS-945 Target: | 5′-GCATTTGTTTTAGCATTACCT-3′ |
| | (SEQ ID NO: 7689) |
| KRAS-947 Target: | 5′-ATTTGTTTTAGCATTACCTAA-3′ |
| | (SEQ ID NO: 7690) |
| KRAS-948 Target: | 5′-TTTGTTTTAGCATTACCTAAT-3′ |
| | (SEQ ID NO: 7691) |
| KRAS-949 Target: | 5′-TTGTTTTAGCATTACCTAATT-3′ |
| | (SEQ ID NO: 7692) |
| KRAS-950 Target: | 5′-TGTTTTAGCATTACCTAATTT-3′ |
| | (SEQ ID NO: 7693) |
| KRAS-986 Target: | 5′-CAGACTGTTAGCTTTTACCTT-3′ |
| | (SEQ ID NO: 7694) |
| KRAS-987 Target: | 5′-AGACTGTTAGCTTTTACCTTA-3′ |
| | (SEQ ID NO: 7695) |
| KRAS-993 Target: | 5′-TTAGCTTTTACCTTAAATGCT-3′ |
| | (SEQ ID NO: 7696) |
| KRAS-994 Target: | 5′-TAGCTTTTACCTTAAATGCTT-3′ |
| | (SEQ ID NO: 7697) |
| KRAS-995 Target: | 5′-AGCTTTTACCTTAAATGCTTA-3′ |
| | (SEQ ID NO: 7698) |
| KRAS-1001 Target: | 5′-TACCTTAAATGCTTATTTTAA-3′ |
| | (SEQ ID NC ): 76 9 9 |
| KRAS-1002 Target: | 5′-ACCTTAAATGCTTATTTTAAA-3′ |
| | (SEQ ID N |
| | ( ): 7700) |
| KRAS-1008 Target: | |
| KRAS-1010 Target: | 5′-TGCTTATTTTAAAATGACAGT-3′ |
| | (SEQ ID NO: 7702) |
| KRAS-1027 Target: | 5′-CAGTGGAAGTTTTTTTTTCCT-3′ |
| | (SEQ ID NO: 7703) |
| KRAS-1029 Target: | 5′-GTGGAAGTTTTTTTTTCCTCT-3′ |
| | (SEQ ID NO: 7704) |
| KRAS-1030 Target: | 5′-TGGAAGTTTTTTTTTCCTCTA-3′ |
| | (SEQ ID NO: 7705) |
| KRAS-1068 Target: | 5′-AGTTTTGGTTTTTGAACTAGC-3′ |
| | (SEQ ID NO: 7706) |
| KRAS-1090 Target: | 5′-ATGCCTGTGAAAAAGAAACTG-3′ |
| | (SEQ ID NO: 7707) |
| KRAS-1097 Target: | 5′-TGAAAAAGAAACTGAATACCT-3′ |
| | (SEQ ID NO: 7708) |
| KRAS-1098 Target: | 5′-GAAAAAGAAACTGAATACCTA-3′ |
| | (SEQ ID NO: 7709) |
| KRAS-1104 Target: | 5′-GAAACTGAATACCTAAGATTT-3′ |
| | (SEQ ID NO: 7710) |
| KRAS-1145 Target: | 5′-CATGCAGTTGATTACTTCTTA-3′ |
| | (SEQ ID NO: 7711) |
| KRAS-1146 Target: | 5′-ATGCAGTTGATTACTTCTTAT-3′ |
| | (SEQ ID NO: 7712) |
| KRAS-1150 Target: | 5′-AGTTGATTACTTCTTATTTTT-3′ |
| | (SEQ ID NO: 7713) |
| KRAS-1158 Target: | 5′-ACTTCTTATTTTTCTTACCAA-3′ |
| | (SEQ ID NO: 7714) |
| KRAS-1159 Target: | 5′-CTTCTTATTTTTCTTACCAAT-3′ |
| | (SEQ ID NO: 7715) |
| KRAS-1160 Target: | 5′-TTCTTATTTTTCTTACCAATT-3′ |
| | (SEQ ID NO: 7716) |
| KRAS-1183 Target: | 5′-GAATGTTGGTGTGAAACAAAT-3′ |
| | (SEQ ID NO: 7717) |
| KRAS-1186 Target: | 5′-TGTTGGTGTGAAACAAATTAA-3′ |
| | (SEQ ID NO: 7718) |
| KRAS-1187 Target: | 5′-GTTGGTGTGAAACAAATTAAT-3′ |
| | (SEQ ID NO: 7719) |
| KRAS-1195 Target: | 5′-GAAACAAATTAATGAAGCTTT-3′ |
| | (SEQ ID NO: 7720) |
| KRAS-1196 Target: | 5′-AAACAAATTAATGAAGCTTTT-3′ |
| | (SEQ ID NO: 7721) |
| KRAS-1228 Target: | 5′-ATTCTGTGTTTTATCTAGTCA-3′ |
| | (SEQ ID NO: 7722) |
| KRAS-1229 Target: | 5′-TTCTGTGTTTTATCTAGTCAC-3′ |
| | (SEQ ID NO: 7723) |
| KRAS-1232 Target: | 5′-TGTGTTTTATCTAGTCACATA-3′ |
| | (SEQ ID NO: 7724) |
| KRAS-1233 Target: | 5′-GTGTTTTATCTAGTCACATAA-3′ |
| | (SEQ ID NO: 7725) |
| KRAS-1238 Target: | 5′-TTATCTAGTCACATAAATGGA-3′ |
| | (SEQ ID NO: 7726) |
| KRAS-1239 Target: | 5′-TATCTAGTCACATAAATGGAT-3′ |
| | (SEQ ID NO: 7727) |
| KRAS-1247 Target: | 5′-CACATAAATGGATTAATTACT-3′ |
| | (SEQ ID NO: 7728) |
| KRAS-1248 Target: | 5′-ACATAAATGGATTAATTACTA-3′ |
| | (SEQ ID NO: 7729) |
| KRAS-1253 Target: | 5′-AATGGATTAATTACTAATTTC-3′ |
| | (SEQ ID NO: 7730) |
| KRAS-1255 Target: | 5′-TGGATTAATTACTAATTTCAG-3′ |
| | (SEQ ID NO: 7731) |
| KRAS-1256 Target: | 5′-GGATTAATTACTAATTTCAGT-3′ |
| | (SEQ ID NO: 7732) |
| KRAS-1257 Target: | 5′-GATTAATTACTAATTTCAGTT-3′ |
| | (SEQ ID NO: 7733) |
| KRAS-1285 Target: | 5′-TCTAATTGGTTTTTACTGAAA-3′ |
| | (SEQ ID NO: 7734) |
| KRAS-1289 Target: | 5′-ATTGGTTTTTACTGAAACATT-3′ |
| | (SEQ ID NO: 7735) |
| KRAS-1290 Target: | 5′-TTGGTTTTTACTGAAACATTG-3′ |
| | (SEQ ID NO: 7736) |
| KRAS-1305 Target: | 5′-ACATTGAGGGAACACAAATTT-3′ |
| | (SEQ ID NO: 7737) |
| KRAS-1306 Target: | 5′-CATTGAGGGAACACAAATTTA-3′ |
| | (SEQ ID NO: 7738) |
| KRAS-1379 Target: | 5′-CCTGATGAATGTAAAGTTACA-3′ |
| | (SEQ ID NO: 7739) |
| KRAS-1380 Target: | 5′-CTGATGAATGTAAAGTTACAC-3′ |
| | (SEQ ID NO: 7740) |
| KRAS-1452 Target: | 5′-CCCCAAAATATTATATTTTTT-3′ |
| | (SEQ ID NO: 7741) |
| KRAS-1453 Target: | 5′-CCCAAAATATTATATTTTTTC-3′ |
| | (SEQ ID NO: 7742) |
| KRAS-1454 Target: | 5′-CCAAAATATTATATTTTTTCT-3′ |
| | (SEQ ID NO: 7743) |
| KRAS-1455 Target: | 5′-CAAAATATTATATTTTTTCTA-3′ |
| | (SEQ ID NO: 7744) |
| KRAS-1457 Target: | 5′-AAATATTATATTTTTTCTATA-3′ |
| | (SEQ ID NO: 7745) |
| KRAS-1458 Target: | 5′-AATATTATATTTTTTCTATAA-3′ |
| | (SEQ ID NO: 7746) |
| KRAS-1459 Target: | 5′-ATATTATATTTTTTCTATAAA-3′ |
| | (SEQ ID NO: 7747) |
| KRAS-1460 Target: | 5′-TATTATATTTTTTCTATAAAA-3′ |
| | (SEQ ID NO: 7748) |
| KRAS-1461 Target: | 5′-ATTATATTTTTTCTATAAAAA-3′ |
| | (SEQ ID NO: 7749) |
| KRAS-1462 Target: | 5′-TTATATTTTTTCTATAAAAAG-3′ |
| | (SEQ ID NO: 7750) |
| KRAS-1463 Target: | 5′-TATATTTTTTCTATAAAAAGA-3′ |
| | (SEQ ID NO: 7751) |
| KRAS-1464 Target: | 5′-ATATTTTTTCTATAAAAAGAA-3′ |
| | (SEQ ID NO: 7752) |
| KRAS-1469 Target: | 5′-TTTTCTATAAAAAGAAAAAAA-3′ |
| | (SEQ ID NO: 7753) |
| KRAS-1470 Target: | 5′-TTTCTATAAAAAGAAAAAAAT-3′ |
| | (SEQ ID NO: 7754) |
| KRAS-1472 Target: | 5′-TCTATAAAAAGAAAAAAATGG-3′ |
| | (SEQ ID NO: 7755) |
| KRAS-1473 Target: | 5′-CTATAAAAAGAAAAAAATGGA-3′ |
| | (SEQ ID NO: 7756) |
| KRAS-1474 Target: | 5′-TATAAAAAGAAAAAAATGGAA-3′ |
| | (SEQ ID NO: 7757) |
| KRAS-1475 Target: | 5′-ATAAAAAGAAAAAAATGGAAA-3′ |
| | (SEQ ID NO: 7758) |
| KRAS-1476 Target: | 5′-TAAAAAGAAAAAAATGGAAAA-3′ |
| | (SEQ ID NO: 7759) |
| KRAS-1477 Target: | 5′-AAAAAGAAAAAAATGGAAAAA-3′ |
| | (SEQ ID NO: 7760) |
| KRAS-1478 Target: | 5′-AAAAGAAAAAAATGGAAAAAA-3′ |
| | (SEQ ID NO: 7761) |
| KRAS-1482 Target: | 5′-GAAAAAAATGGAAAAAAATTA-3′ |
| | (SEQ ID NO: 7762) |
| KRAS-1483 Target: | 5′-AAAAAAATGGAAAAAAATTAC-3′ |
| | (SEQ ID NO: 7763) |
| KRAS-1488 Target: | 5′-AATGGAAAAAAATTACAAGGC-3′ |
| | (SEQ ID NO: 7764) |
| KRAS-1489 Target: | 5′-ATGGAAAAAAATTACAAGGCA-3′ |
| | (SEQ ID NO: 7765) |
| KRAS-1490 Target: | 5′-TGGAAAAAAATTACAAGGCAA-3′ |
| | (SEQ ID NO: 7766) |
| KRAS-1525 Target: | 5′-AGGCCATTTCCTTTTCACATT-3′ |
| | (SEQ ID NO: 7767) |
| KRAS-1531 Target: | 5′-TTTCCTTTTCACATTAGATAA-3′ |
| | (SEQ ID NO: 7768) |
| KRAS-1538 Target: | 5′-TTCACATTAGATAAATTACTA-3′ |
| | (SEQ ID NO: 7769) |
| KRAS-1539 Target: | 5′-TCACATTAGATAAATTACTAT-3′ |
| | (SEQ ID NO: 7770) |
| KRAS-1540 Target: | 5′-CACATTAGATAAATTACTATA-3′ |
| | (SEQ ID NO: 7771) |
| KRAS-1595 Target: | 5′-CCAGTATGAAATGGGGATTAT-3′ |
| | (SEQ ID NO: 7772) |
| KRAS-1604 Target: | 5′-AATGGGGATTATTATAGCAAC-3′ |
| | (SEQ ID NO: 7773) |
| KRAS-1631 Target: | 5′-GGGGCTATATTTACATGCTAC-3′ |
| | (SEQ ID NO: 7774) |
| KRAS-1632 Target: | 5′-GGGCTATATTTACATGCTACT-3′ |
| | (SEQ ID NO: 7775) |
| KRAS-1633 Target: | 5′-GGCTATATTTACATGCTACTA-3′ |
| | (SEQ ID NO: 7776) |
| KRAS-1634 Target: | 5′-GCTATATTTACATGCTACTAA-3′ |
| | (SEQ ID NO: 7777) |
| KRAS-1635 Target: | 5′-CTATATTTACATGCTACTAAA-3′ |
| | (SEQ ID NO: 7778) |
| KRAS-1640 Target: | 5′-TTTACATGCTACTAAATTTTT-3′ |
| | (SEQ ID NO: 7779) |
| KRAS-1647 Target: | 5′-GCTACTAAATTTTTATAATAA-3′ |
| | (SEQ ID NO: 7780) |
| KRAS-1648 Target: | 5′-CTACTAAATTTTTATAATAAT-3′ |
| | (SEQ ID NO: 7781) |
| KRAS-1650 Target: | 5′-ACTAAATTTTTATAATAATTG-3′ |
| | (SEQ ID NO: 7782) |
| KRAS-1651 Target: | 5′-CTAAATTTTTATAATAATTGA-3′ |
| | (SEQ ID NO: 7783) |
| KRAS-1652 Target: | 5′-TAAATTTTTATAATAATTGAA-3′ |
| | (SEQ ID NO: 7784) |
| KRAS-1653 Target: | 5′-AAATTTTTATAATAATTGAAA-3′ |
| | (SEQ ID NO: 7785) |
| KRAS-1654 Target: | 5′-AATTTTTATAATAATTGAAAA-3′ |
| | (SEQ ID NO: 7786) |
| KRAS-1655 Target: | 5′-ATTTTTATAATAATTGAAAAG-3′ |
| | (SEQ ID NO: 7787) |
| KRAS-1656 Target: | 5′-TTTTTATAATAATTGAAAAGA-3′ |
| | (SEQ ID NO: 7788) |
| KRAS-1657 Target: | 5′-TTTTATAATAATTGAAAAGAT-3′ |
| | (SEQ ID NO: 7789) |
| KRAS-1658 Target: | 5′-TTTATAATAATTGAAAAGATT-3′ |
| | (SEQ ID NO: 7790) |
| KRAS-1662 Target: | 5′-TAATAATTGAAAAGATTTTAA-3′ |
| | (SEQ ID NO: 7791) |
| KRAS-1663 Target: | 5′-AATAATTGAAAAGATTTTAAC-3′ |
| | (SEQ ID NO: 7792) |
| KRAS-1665 Target: | 5′-TAATTGAAAAGATTTTAACAA-3′ |
| | (SEQ ID NO: 7793) |
| KRAS-1666 Target: | 5′-AATTGAAAAGATTTTAACAAG-3′ |
| | (SEQ ID NO: 7794) |
| KRAS-1667 Target: | 5′-ATTGAAAAGATTTTAACAAGT-3′ |
| | (SEQ ID NO: 7795) |
| KRAS-1668 Target: | 5′-TTGAAAAGATTTTAACAAGTA-3′ |
| | (SEQ ID NO: 7796) |
| KRAS-1669 Target: | 5′-TGAAAAGATTTTAACAAGTAT-3′ |
| | (SEQ ID NO: 7797) |
| KRAS-1670 Target: | 5′-GAAAAGATTTTAACAAGTATA-3′ |
| | (SEQ ID NO: 7798) |
| KRAS-1671 Target: | 5′-AAAAGATTTTAACAAGTATAA-3′ |
| | (SEQ ID NO: 7799) |
| KRAS-1672 Target: | 5′-AAAGATTTTAACAAGTATAAA-3′ |
| | (SEQ ID NO: 7800) |
| KRAS-1673 Target: | 5′-AAGATTTTAACAAGTATAAAA-3′ |
| | (SEQ ID NO: 7801) |
| KRAS-1680 Target: | 5′-TAACAAGTATAAAAAATTCTC-3′ |
| | (SEQ ID NO: 7802) |
| KRAS-1681 Target: | 5′-AACAAGTATAAAAAATTCTCA-3′ |
| | (SEQ ID NO: 7803) |
| KRAS-1682 Target: | 5′-ACAAGTATAAAAAATTCTCAT-3′ |
| | (SEQ ID NO: 7804) |
| KRAS-1683 Target: | 5′-CAAGTATAAAAAATTCTCATA-3′ |
| | (SEQ ID NO: 7805) |
| KRAS-1684 Target: | 5′-AAGTATAAAAAATTCTCATAG-3′ |
| | (SEQ ID NO: 7806) |
| KRAS-1685 Target: | 5′-AGTATAAAAAATTCTCATAGG-3′ |
| | (SEQ ID NO: 7807) |
| KRAS-1686 Target: | 5′-GTATAAAAAATTCTCATAGGA-3′ |
| | (SEQ ID NO: 7808) |
| KRAS-1687 Target: | 5′-TATAAAAAATTCTCATAGGAA-3′ |
| | (SEQ ID NO: 7809) |
| KRAS-1689 Target: | 5′-TAAAAAATTCTCATAGGAATT-3′ |
| | (SEQ ID NO: 7810) |
| KRAS-1690 Target: | 5′-AAAAAATTCTCATAGGAATTA-3′ |
| | (SEQ ID NO: 7811) |
| KRAS-1734 Target: | 5′-TGCTCTTTCATAGTATAACTT-3′ |
| | (SEQ ID NO: 7812) |
| KRAS-1739 Target: | 5′-TTTCATAGTATAACTTTAAAT-3′ |
| | (SEQ ID NO: 7813) |
| KRAS-1740 Target: | 5′-TTCATAGTATAACTTTAAATC-3′ |
| | (SEQ ID NO: 7814) |
| KRAS-1751 Target: | 5′-ACTTTAAATCTTTTCTTCAAC-3′ |
| | (SEQ ID NO: 7815) |
| KRAS-1752 Target: | 5′-CTTTAAATCTTTTCTTCAACT-3′ |
| | (SEQ ID NO: 7816) |
| KRAS-1767 Target: | 5′-TCAACTTGAGTCTTTGAAGAT-3′ |
| | (SEQ ID NO: 7817) |
| KRAS-1769 Target: | 5′-AACTTGAGTCTTTGAAGATAG-3′ |
| | (SEQ ID NO: 7818) |
| KRAS-1770 Target: | 5′-ACTTGAGTCTTTGAAGATAGT-3′ |
| | (SEQ ID NO: 7819) |
| KRAS-1781 Target: | 5′-TGAAGATAGTTTTAATTCTGC-3′ |
| | (SEQ ID NO: 7820) |
| KRAS-1782 Target: | 5′-GAAGATAGTTTTAATTCTGCT-3′ |
| | (SEQ ID NO: 7821) |
| KRAS-1783 Target: | 5′-AAGATAGTTTTAATTCTGCTT-3′ |
| | (SEQ ID NO: 7822) |
| KRAS-1797 Target: | 5′-TCTGCTTGTGACATTAAAAGA-3′ |
| | (SEQ ID NO: 7823) |
| KRAS-2045 Target: | 5′-AGAGCATTGCTTTTGTTTCTT-3′ |
| | (SEQ ID NO: 7824) |
| KRAS-2046 Target: | 5′-GAGCATTGCTTTTGTTTCTTA-3′ |
| | (SEQ ID NO: 7825) |
| KRAS-2052 Target: | 5′-TGCTTTTGTTTCTTAAGAAAA-3′ |
| | (SEQ ID NO: 7826) |
| KRAS-2059 Target: | 5′-GTTTCTTAAGAAAACAAACTC-3′ |
| | (SEQ ID NO: 7827) |
| KRAS-2060 Target: | 5′-TTTCTTAAGAAAACAAACTCT-3′ |
| | (SEQ ID NO: 7828) |
| KRAS-2061 Target: | 5′-TTCTTAAGAAAACAAACTCTT-3′ |
| | (SEQ ID NO: 7829) |
| KRAS-2062 Target: | 5′-TCTTAAGAAAACAAACTCTTT-3′ |
| | (SEQ ID NO: 7830) |
| KRAS-2063 Target: | 5′-CTTAAGAAAACAAACTCTTTT-3′ |
| | (SEQ ID NO: 7831) |
| KRAS-2064 Target: | 5′-TTAAGAAAACAAACTCTTTTT-3′ |
| | (SEQ ID NO: 7832) |
| KRAS-2065 Target: | 5′-TAAGAAAACAAACTCTTTTTT-3′ |
| | (SEQ ID NO: 7833) |
| KRAS-2069 Target: | 5′-AAAACAAACTCTTTTTTAAAA-3′ |
| | (SEQ ID NO: 7834) |
| KRAS-2075 Target: | 5′-AACTCTTTTTTAAAAATTACT-3′ |
| | (SEQ ID NO: 7835) |
| KRAS-2076 Target: | 5′-ACTCTTTTTTAAAAATTACTT-3′ |
| | (SEQ ID NO: 7836) |
| KRAS-2077 Target: | 5′-CTCTTTTTTAAAAATTACTTT-3′ |
| | (SEQ ID NO: 7837) |
| KRAS-2078 Target: | 5′-TCTTTTTTAAAAATTACTTTT-3′ |
| | (SEQ ID NO: 7838) |
| KRAS-2079 Target: | 5′-CTTTTTTAAAAATTACTTTTA-3′ |
| | (SEQ ID NO: 7839) |
| KRAS-2080 Target: | 5′-TTTTTTAAAAATTACTTTTAA-3′ |
| | (SEQ ID NO: 7840) |
| KRAS-2081 Target: | 5′-TTTTTAAAAATTACTTTTAAA-3′ |
| | (SEQ ID NO: 7841) |
| KRAS-2082 Target: | 5′-TTTTAAAAATTACTTTTAAAT-3′ |
| | (SEQ ID NO: 7842) |
| KRAS-2083 Target: | 5′-TTTAAAAATTACTTTTAAATA-3′ |
| | (SEQ ID NO: 7843) |
| KRAS-2090 Target: | 5′-ATTACTTTTAAATATTAACTC-3′ |
| | (SEQ ID NO: 7844) |
| KRAS-2091 Target: | 5′-TTACTTTTAAATATTAACTCA-3′ |
| | (SEQ ID NO: 7845) |
| KRAS-2093 Target: | 5′-ACTTTTAAATATTAACTCAAA-3′ |
| | (SEQ ID NO: 7846) |
| KRAS-2095 Target: | 5′-TTTTAAATATTAACTCAAAAG-3′ |
| | (SEQ ID NO: 7847) |
| KRAS-2096 Target: | 5′-TTTAAATATTAACTCAAAAGT-3′ |
| | (SEQ ID NO: 7848) |
| KRAS-2097 Target: | 5′-TTAAATATTAACTCAAAAGTT-3′ |
| | (SEQ ID NO: 7849) |
| KRAS-2098 Target: | 5′-TAAATATTAACTCAAAAGTTG-3′ |
| | (SEQ ID NO: 7850) |
| KRAS-2132 Target: | 5′-GTGGTGTGCCAAGACATTAAT-3′ |
| | (SEQ ID NO: 7851) |
| KRAS-2137 Target: | 5′-GTGCCAAGACATTAATTTTTT-3′ |
| | (SEQ ID NO: 7852) |
| KRAS-2138 Target: | 5′-TGCCAAGACATTAATTTTTTT-3′ |
| | (SEQ ID NO: 7853) |
| KRAS-2144 Target: | 5′-GACATTAATTTTTTTTTTAAA-3′ |
| | (SEQ ID NO: 7854) |
| KRAS-2145 Target: | 5′-ACATTAATTTTTTTTTTAAAC-3′ |
| | (SEQ ID NO: 7855) |
| KRAS-2147 Target: | 5′-ATTAATTTTTTTTTTAAACAA-3′ |
| | (SEQ ID NO: 7856) |
| KRAS-2149 Target: | 5′-TAATTTTTTTTTTAAACAATG-3′ |
| | (SEQ ID NO: 7857) |
| KRAS-2150 Target: | 5′-AATTTTTTTTTTAAACAATGA-3′ |
| | (SEQ ID NO: 7858) |
| KRAS-2151 Target: | 5′-ATTTTTTTTTTAAACAATGAA-3′ |
| | (SEQ ID NO: 7859) |
| KRAS-2152 Target: | 5′-TTTTTTTTTTAAACAATGAAG-3′ |
| | (SEQ ID NO: 7860) |
| KRAS-2153 Target: | 5′-TTTTTTTTTAAACAATGAAGT-3′ |
| | (SEQ ID NO: 7861) |
| KRAS-2155 Target: | 5′-TTTTTTTAAACAATGAAGTGA-3′ |
| | (SEQ ID NO: 7862) |
| KRAS-2156 Target: | 5′-TTTTTTAAACAATGAAGTGAA-3′ |
| | (SEQ ID NO: 7863) |
| KRAS-2157 Target: | 5′-TTTTTAAACAATGAAGTGAAA-3′ |
| | (SEQ ID NO: 7864) |
| KRAS-2165 Target: | 5′-CAATGAAGTGAAAAAGTTTTA-3′ |
| | (SEQ ID NO: 7865) |
| KRAS-2171 Target: | 5′-AGTGAAAAAGTTTTACAATCT-3′ |
| | (SEQ ID NO: 7866) |
| KRAS-2172 Target: | 5′-GTGAAAAAGTTTTACAATCTC-3′ |
| | (SEQ ID NO: 7867) |
| KRAS-2173 Target: | 5′-TGAAAAAGTTTTACAATCTCT-3′ |
| | (SEQ ID NO: 7868) |
| KRAS-2214 Target: | 5′-ACACTGGTTAAATTAACATTG-3′ |
| | (SEQ ID NO: 7869) |
| KRAS-2215 Target: | 5′-CACTGGTTAAATTAACATTGC-3′ |
| | (SEQ ID NO: 7870) |
| KRAS-2216 Target: | 5′-ACTGGTTAAATTAACATTGCA-3′ |
| | (SEQ ID NO: 7871) |
| KRAS-2227 Target: | 5′-TAACATTGCATAAACACTTTT-3′ |
| | (SEQ ID NO: 7872) |
| KRAS-2245 Target: | 5′-TTTCAAGTCTGATCCATATTT-3′ |
| | (SEQ ID NO: 7873) |
| KRAS-2255 Target: | 5′-GATCCATATTTAATAATGCTT-3′ |
| | (SEQ ID NO: 7874) |
| KRAS-2256 Target: | 5′-ATCCATATTTAATAATGCTTT-3′ |
| | (SEQ ID NO: 7875) |
| KRAS-2257 Target: | 5′-TCCATATTTAATAATGCTTTA-3′ |
| | (SEQ ID NO: 7876) |
| KRAS-2258 Target: | 5′-CCATATTTAATAATGCTTTAA-3′ |
| | (SEQ ID NO: 7877) |
| KRAS-2259 Target: | 5′-CATATTTAATAATGCTTTAAA-3′ |
| | (SEQ ID NO: 7878) |
| KRAS-2260 Target: | 5′-ATATTTAATAATGCTTTAAAA-3′ |
| | (SEQ ID NO: 7879) |
| KRAS-2262 Target: | 5′-ATTTAATAATGCTTTAAAATA-3′ |
| | (SEQ ID NO: 7880) |
| KRAS-2263 Target: | 5′-TTTAATAATGCTTTAAAATAA-3′ |
| | (SEQ ID NO: 7881) |
| KRAS-2264 Target: | 5′-TTAATAATGCTTTAAAATAAA-3′ |
| | (SEQ ID NO: 7882) |
| KRAS-2265 Target: | 5′-TAATAATGCTTTAAAATAAAA-3′ |
| | (SEQ ID NO: 7883) |
| KRAS-2272 Target: | 5′-GCTTTAAAATAAAAATAAAAA-3′ |
| | (SEQ ID NO: 7884) |
| KRAS-2278 Target: | 5′-AAATAAAAATAAAAACAATCC-3′ |
| | (SEQ ID NO: 7885) |
| KRAS-2279 Target: | 5′-AATAAAAATAAAAACAATCCT-3′ |
| | (SEQ ID NO: 7886) |
| KRAS-2280 Target: | 5′-ATAAAAATAAAAACAATCCTT-3′ |
| | (SEQ ID NO: 7887) |
| KRAS-2281 Target: | 5′-TAAAAATAAAAACAATCCTTT-3′ |
| | (SEQ ID NO: 7888) |
| KRAS-2282 Target: | 5′-AAAAATAAAAACAATCCTTTT-3′ |
| | (SEQ ID NO: 7889) |
| KRAS-2283 Target: | 5′-AAAATAAAAACAATCCTTTTG-3′ |
| | (SEQ ID NO: 7890) |
| KRAS-2284 Target: | 5′-AAATAAAAACAATCCTTTTGA-3′ |
| | (SEQ ID NO: 7891) |
| KRAS-2285 Target: | 5′-AATAAAAACAATCCTTTTGAT-3′ |
| | (SEQ ID NO: 7892) |
| KRAS-2289 Target: | 5′-AAAACAATCCTTTTGATAAAT-3′ |
| | (SEQ ID NO: 7893) |
| KRAS-2294 Target: | 5′-AATCCTTTTGATAAATTTAAA-3′ |
| | (SEQ ID NO: 7894) |
| KRAS-2295 Target: | 5′-ATCCTTTTGATAAATTTAAAA-3′ |
| | (SEQ ID NO: 7895) |
| KRAS-2296 Target: | 5′-TCCTTTTGATAAATTTAAAAT-3′ |
| | (SEQ ID NO: 7896) |
| KRAS-2300 Target: | 5′-TTTGATAAATTTAAAATGTTA-3′ |
| | (SEQ ID NO: 7897) |
| KRAS-2301 Target: | 5′-TTGATAAATTTAAAATGTTAC-3′ |
| | (SEQ ID NO: 7898) |
| KRAS-2302 Target: | 5′-TGATAAATTTAAAATGTTACT-3′ |
| | (SEQ ID NO: 7899) |
| KRAS-2303 Target: | 5′-GATAAATTTAAAATGTTACTT-3′ |
| | (SEQ ID NO: 7900) |
| KRAS-2304 Target: | 5′-ATAAATTTAAAATGTTACTTA-3′ |
| | (SEQ ID NO: 7901) |
| KRAS-2305 Target: | 5′-TAAATTTAAAATGTTACTTAT-3′ |
| | (SEQ ID NO: 7902) |
| KRAS-2307 Target: | 5′-AATTTAAAATGTTACTTATTT-3′ |
| | (SEQ ID NO: 7903) |
| KRAS-2308 Target: | 5′-ATTTAAAATGTTACTTATTTT-3′ |
| | (SEQ ID NO: 7904) |
| KRAS-2309 Target: | 5′-TTTAAAATGTTACTTATTTTA-3′ |
| | (SEQ ID NO: 7905) |
| KRAS-2310 Target: | 5′-TTAAAATGTTACTTATTTTAA-3′ |
| | (SEQ ID NO: 7906) |
| KRAS-2311 Target: | 5′-TAAAATGTTACTTATTTTAAA-3′ |
| | (SEQ ID NO: 7907) |
| KRAS-2313 Target: | 5′-AAATGTTACTTATTTTAAAAT-3′ |
| | (SEQ ID NO: 7908) |
| KRAS-2318 Target: | 5′-TTACTTATTTTAAAATAAATG-3′ |
| | (SEQ ID NO: 7909) |
| KRAS-2320 Target: | 5′-ACTTATTTTAAAATAAATGAA-3′ |
| | (SEQ ID NO: 7910) |
| KRAS-2321 Target: | 5′-CTTATTTTAAAATAAATGAAG-3′ |
| | (SEQ ID NO: 7911) |
| KRAS-2324 Target: | 5′-ATTTTAAAATAAATGAAGTGA-3′ |
| | (SEQ ID NO: 7912) |
| KRAS-2325 Target: | 5′-TTTTAAAATAAATGAAGTGAG-3′ |
| | (SEQ ID NO: 7913) |
| KRAS-2445 Target: | 5′-TATCCATTTCTTCATGTTAAA-3′ |
| | (SEQ ID NO: 7914) |
| KRAS-2446 Target: | 5′-ATCCATTTCTTCATGTTAAAA-3′ |
| | (SEQ ID NO: 7915) |
| KRAS-2473 Target: | 5′-ATCTCAAACTCTTAGTTTTTT-3′ |
| | (SEQ ID NO: 7916) |
| KRAS-2483 Target: | 5′-CTTAGTTTTTTTTTTTTACAA-3′ |
| | (SEQ ID NO: 7917) |
| KRAS-2484 Target: | 5′-TTAGTTTTTTTTTTTTACAAC-3′ |
| | (SEQ ID NO: 7918) |
| KRAS-2485 Target: | 5′-TAGTTTTTTTTTTTTACAACT-3′ |
| | (SEQ ID NO: 7919) |
| KRAS-2486 Target: | 5′-AGTTTTTTTTTTTTACAACTA-3′ |
| | (SEQ ID NO: 7920) |
| KRAS-2487 Target: | 5′-GTTTTTTTTTTTTACAACTAT-3′ |
| | (SEQ ID NO: 7921) |
| KRAS-2488 Target: | 5′-TTTTTTTTTTTTACAACTATG-3′ |
| | (SEQ ID NO: 7922) |
| KRAS-2489 Target: | 5′-TTTTTTTTTTTACAACTATGT-3′ |
| | (SEQ ID NO: 7923) |
| KRAS-2490 Target: | 5′-TTTTTTTTTTAGAAGTATGTA-3′ |
| | (SEQ ID NO: 7924) |
| KRAS-2491 Target: | 5′-TTTTTTTTTAGAAGTATGTAA-3′ |
| | (SEQ ID NO: 7925) |
| KRAS-2492 Target: | 5′-TTTTTTTTAGAAGTATGTAAT-3′ |
| | (SEQ ID NO: 7926) |
| KRAS-2493 Target: | 5′-TTTTTTTAGAAGTATGTAATT-3′ |
| | (SEQ ID NO: 7927) |
| KRAS-2500 Target: | 5′-ACAACTATGTAATTTATATTC-3′ |
| | (SEQ ID NO: 7928) |
| KRAS-2501 Target: | 5′-CAACTATGTAATTTATATTCC-3′ |
| | (SEQ ID NO: 7929) |
| KRAS-2502 Target: | 5′-AACTATGTAATTTATATTCCA-3′ |
| | (SEQ ID NO: 7930) |
| KRAS-2508 Target: | 5′-GTAATTTATATTCCATTTACA-3′ |
| | (SEQ ID NO: 7931) |
| KRAS-2509 Target: | 5′-TAATTTATATTCCATTTACAT-3′ |
| | (SEQ ID NO: 7932) |
| KRAS-2510 Target: | 5′-AATTTATATTCCATTTACATA-3′ |
| | (SEQ ID NO: 7933) |
| KRAS-2511 Target: | 5′-ATTTATATTCCATTTACATAA-3′ |
| | (SEQ ID NO: 7934) |
| KRAS-2523 Target: | 5′-TTTACATAAGGATACACTTAT-3′ |
| | (SEQ ID NO: 7935) |
| KRAS-2527 Target: | 5′-CATAAGGATACACTTATTTGT-3′ |
| | (SEQ ID NO: 7936) |
| KRAS-2559 Target: | 5′-CAATCTGTAAATTTTTAACCT-3′ |
| | (SEQ ID NO: 7937) |
| KRAS-2560 Target: | 5′-AATCTGTAAATTTTTAACCTA-3′ |
| | (SEQ ID NO: 7938) |
| KRAS-2561 Target: | 5′-ATCTGTAAATTTTTAACCTAT-3′ |
| | (SEQ ID NO: 7939) |
| KRAS-2617 Target: | 5′-TGTGCAAGAGGTGAAGTTTAT-3′ |
| | (SEQ ID NO: 7940) |
| KRAS-2619 Target: | 5′-TGCAAGAGGTGAAGTTTATAT-3′ |
| | (SEQ ID NO: 7941) |
| KRAS-2620 Target: | 5′-GCAAGAGGTGAAGTTTATATT-3′ |
| | (SEQ ID NO: 7942) |
| KRAS-2622 Target: | 5′-AAGAGGTGAAGTTTATATTTG-3′ |
| | (SEQ ID NO: 7943) |
| KRAS-2623 Target: | 5′-AGAGGTGAAGTTTATATTTGA-3′ |
| | (SEQ ID NO: 7944) |
| KRAS-2628 Target: | 5′-TGAAGTTTATATTTGAATATC-3′ |
| | (SEQ ID NO: 7945) |
| KRAS-2716 Target: | 5′-TGACTTGATGCAGTTTTAATA-3′ |
| | (SEQ ID NO: 7946) |
| KRAS-2718 Target: | 5′-ACTTGATGCAGTTTTAATACT-3′ |
| | (SEQ ID NO: 7947) |
| KRAS-2869 Target: | 5′-GGGATTTGACCTAATCACTAA-3′ |
| | (SEQ ID NO: 7948) |
| KRAS-2875 Target: | 5′-TGACCTAATCACTAATTTTCA-3′ |
| | (SEQ ID NO: 7949) |
| KRAS-2944 Target: | 5′-GACAGTAGGATTTTTCAAACC-3′ |
| | (SEQ ID NO: 7950) |
| KRAS-2989 Target: | 5′-CCAGTGGAAGGAGAATTTAAT-3′ |
| | (SEQ ID NO: 7951) |
| KRAS-2992 Target: | 5′-GTGGAAGGAGAATTTAATAAA-3′ |
| | (SEQ ID NO: 7952) |
| KRAS-2994 Target: | 5′-GGAAGGAGAATTTAATAAAGA-3′ |
| | (SEQ ID NO: 7953) |
| KRAS-2995 Target: | 5′-GAAGGAGAATTTAATAAAGAT-3′ |
| | (SEQ ID NO: 7954) |
| KRAS-2999 Target: | 5′-GAGAATTTAATAAAGATAGTG-3′ |
| | (SEQ ID NO: 7955) |
| KRAS-3028 Target: | 5′-ATTCCTTAGGTAATCTATAAC-3′ |
| | (SEQ ID NO: 7956) |
| KRAS-3029 Target: | 5′-TTCCTTAGGTAATCTATAACT-3′ |
| | (SEQ ID NO: 7957) |
| KRAS-3063 Target: | 5′-GTAACAGTAATACATTCCATT-3′ |
| | (SEQ ID NO: 7958) |
| KRAS-3065 Target: | 5′-AACAGTAATACATTCCATTGT-3′ |
| | (SEQ ID NO: 7959) |
| KRAS-3066 Target: | 5′-ACAGTAATACATTCCATTGTT-3′ |
| | (SEQ ID NO: 7960) |
| KRAS-3067 Target: | 5′-CAGTAATACATTCCATTGTTT-3′ |
| | (SEQ ID NO: 7961) |
| KRAS-3077 Target: | 5′-TTCCATTGTTTTAGTAACCAG-3′ |
| | (SEQ ID NO: 7962) |
| KRAS-3091 Target: | 5′-TAACCAGAAATCTTCATGCAA-3′ |
| | (SEQ ID NO: 7963) |
| KRAS-3101 Target: | 5′-TCTTCATGCAATGAAAAATAC-3′ |
| | (SEQ ID NO: 7964) |
| KRAS-3108 Target: | 5′-GCAATGAAAAATACTTTAATT-3′ |
| | (SEQ ID NO: 7965) |
| KRAS-3110 Target: | 5′-AATGAAAAATACTTTAATTCA-3′ |
| | (SEQ ID NO: 7966) |
| KRAS-3111 Target: | 5′-ATGAAAAATACTTTAATTCAT-3′ |
| | (SEQ ID NO: 7967) |
| KRAS-3125 Target: | 5′-AATTCATGAAGCTTACTTTTT-3′ |
| | (SEQ ID NO: 7968) |
| KRAS-3128 Target: | 5′-TCATGAAGCTTACTTTTTTTT-3′ |
| | (SEQ ID NO: 7969) |
| KRAS-3132 Target: | 5′-GAAGCTTACTTTTTTTTTTTG-3′ |
| | (SEQ ID NO: 7970) |
| KRAS-3136 Target: | 5′-CTTACTTTTTTTTTTTGGTGT-3′ |
| | (SEQ ID NO: 7971) |
| KRAS-3137 Target: | 5′-TTACTTTTTTTTTTTGGTGTC-3′ |
| | (SEQ ID NO: 7972) |
| KRAS-3295 Target: | 5′-TCAACTAATTTTTGTATTTTT-3′ |
| | (SEQ ID NO: 7973) |
| KRAS-3298 Target: | 5′-ACTAATTTTTGTATTTTTAGG-3′ |
| | (SEQ ID NO: 7974) |
| KRAS-3411 Target: | 5′-AACTCATTTATTCAGCAAATA-3′ |
| | (SEQ ID NO: 7975) |
| KRAS-3413 Target: | 5′-CTCATTTATTCAGCAAATATT-3′ |
| | (SEQ ID NO: 7976) |
| KRAS-3415 Target: | 5′-CATTTATTCAGCAAATATTTA-3′ |
| | (SEQ ID NO: 7977) |
| KRAS-3587 Target: | 5′-CGTATTTTAGTTTTGCAAAGA-3′ |
| | (SEQ ID NO: 7978) |
| KRAS-3628 Target: | 5′-AGCTCTATAATTGTTTTGCTA-3′ |
| | (SEQ ID NO: 7979) |
| KRAS-3675 Target: | 5′-GCTACTTTATGTAAATCACTT-3′ |
| | (SEQ ID NO: 7980) |
| KRAS-3676 Target: | 5′-CTACTTTATGTAAATCACTTC-3′ |
| | (SEQ ID NO: 7981) |
| KRAS-3677 Target: | 5′-TACTTTATGTAAATCACTTCA-3′ |
| | (SEQ ID NO: 7982) |
| KRAS-3678 Target: | 5′-ACTTTATGTAAATCACTTCAT-3′ |
| | (SEQ ID NO: 7983) |
| KRAS-3679 Target: | 5′-CTTTATGTAAATCACTTCATT-3′ |
| | (SEQ ID NO: 7984) |
| KRAS-3680 Target: | 5′-TTTATGTAAATCACTTCATTG-3′ |
| | (SEQ ID NO: 7985) |
| KRAS-3681 Target: | 5′-TTATGTAAATCACTTCATTGT-3′ |
| | (SEQ ID NO: 7986) |
| KRAS-3695 Target: | 5′-TCATTGTTTTAAAGGAATAAA-3′ |
| | (SEQ ID NO: 7987) |
| KRAS-3696 Target: | 5′-CATTGTTTTAAAGGAATAAAC-3′ |
| | (SEQ ID NO: 7988) |
| KRAS-3699 Target: | 5′-TGTTTTAAAGGAATAAACTTG-3′ |
| | (SEQ ID NO: 7989) |
| KRAS-3700 Target: | 5′-GTTTTAAAGGAATAAACTTGA-3′ |
| | (SEQ ID NO: 7990) |
| KRAS-3701 Target: | 5′-TTTTAAAGGAATAAACTTGAT-3′ |
| | (SEQ ID NO: 7991) |
| KRAS-3703 Target: | 5′-TTAAAGGAATAAACTTGATTA-3′ |
| | (SEQ ID NO: 7992) |
| KRAS-3704 Target: | 5′-TAAAGGAATAAACTTGATTAT-3′ |
| | (SEQ ID NO: 7993) |
| KRAS-3705 Target: | 5′-AAAGGAATAAACTTGATTATA-3′ |
| | (SEQ ID NO: 7994) |
| KRAS-3706 Target: | 5′-AAGGAATAAACTTGATTATAT-3′ |
| | (SEQ ID NO: 7995) |
| KRAS-3707 Target: | 5′-AGGAATAAACTTGATTATATT-3′ |
| | (SEQ ID NO: 7996) |
| KRAS-3712 Target: | 5′-TAAACTTGATTATATTGTTTT-3′ |
| | (SEQ ID NO: 7997) |
| KRAS-3713 Target: | 5′-AAACTTGATTATATTGTTTTT-3′ |
| | (SEQ ID NO: 7998) |
| KRAS-3716 Target: | 5′-CTTGATTATATTGTTTTTTTA-3′ |
| | (SEQ ID NO: 7999) |
| KRAS-3721 Target: | 5′-TTATATTGTTTTTTTATTTGG-3′ |
| | (SEQ ID NO: 8000) |
| KRAS-3722 Target: | 5′-TATATTGTTTTTTTATTTGGC-3′ |
| | (SEQ ID NO: 8001) |
| KRAS-3726 Target: | 5′-TTGTTTTTTTATTTGGCATAA-3′ |
| | (SEQ ID NO: 8002) |
| KRAS-3727 Target: | 5′-TGTTTTTTTATTTGGCATAAC-3′ |
| | (SEQ ID NO: 8003) |
| KRAS-3739 Target: | 5′-TGGCATAACTGTGATTCTTTT-3′ |
| | (SEQ ID NO: 8004) |
| KRAS-3744 Target: | 5′-TAACTGTGATTCTTTTAGGAC-3′ |
| | (SEQ ID NO: 8005) |
| KRAS-3745 Target: | 5′-AACTGTGATTCTTTTAGGACA-3′ |
| | (SEQ ID NO: 8006) |
| KRAS-3781 Target: | 5′-AAGGTGTATGTCAGATATTCA-3′ |
| | (SEQ ID NO: 8007) |
| KRAS-3782 Target: | 5′-AGGTGTATGTCAGATATTCAT-3′ |
| | (SEQ ID NO: 8008) |
| KRAS-3808 Target: | 5′-CCCAAATGTGTAATATTCCAG-3′ |
| | (SEQ ID NO: 8009) |
| KRAS-3836 Target: | 5′-TGCATAAGTAATTAAAATATA-3′ |
| | (SEQ ID NO: 8010) |
| KRAS-3837 Target: | 5′-GCATAAGTAATTAAAATATAC-3′ |
| | (SEQ ID NO: 8011) |
| KRAS-3838 Target: | 5′-CATAAGTAATTAAAATATACT-3′ |
| | (SEQ ID NO: 8012) |
| KRAS-3839 Target: | 5′-ATAAGTAATTAAAATATACTT-3′ |
| | (SEQ ID NO: 8013) |
| KRAS-3840 Target: | 5′-TAAGTAATTAAAATATACTTA-3′ |
| | (SEQ ID NO: 8014) |
| KRAS-3841 Target: | 5′-AAGTAATTAAAATATACTTAA-3′ |
| | (SEQ ID NO: 8015) |
| KRAS-3842 Target: | 5′-AGTAATTAAAATATACTTAAA-3′ |
| | (SEQ ID NO: 8016) |
| KRAS-3843 Target: | 5′-GTAATTAAAATATACTTAAAA-3′ |
| | (SEQ ID NO: 8017) |
| KRAS-3844 Target: | 5′-TAATTAAAATATACTTAAAAA-3′ |
| | (SEQ ID NO: 8018) |
| KRAS-3846 Target: | 5′-ATTAAAATATACTTAAAAATT-3′ |
| | (SEQ ID NO: 8019) |
| KRAS-3847 Target: | 5′-TTAAAATATACTTAAAAATTA-3′ |
| | (SEQ ID NO: 8020) |
| KRAS-3848 Target: | 5′-TAAAATATACTTAAAAATTAA-3′ |
| | (SEQ ID NO: 8021) |
| KRAS-3849 Target: | 5′-AAAATATACTTAAAAATTAAT-3′ |
| | (SEQ ID NO: 8022) |
| KRAS-3853 Target: | 5′-TATACTTAAAAATTAATAGTT-3′ |
| | (SEQ ID NO: 8023) |
| KRAS-3857 Target: | 5′-CTTAAAAATTAATAGTTTTAT-3′ |
| | (SEQ ID NO: 8024) |
| KRAS-3858 Target: | 5′-TTAAAAATTAATAGTTTTATC-3′ |
| | (SEQ ID NO: 8025) |
| KRAS-3859 Target: | 5′-TAAAAATTAATAGTTTTATCT-3′ |
| | (SEQ ID NO: 8026) |
| KRAS-3874 Target: | 5′-TTATCTGGGTACAAATAAACA-3′ |
| | (SEQ ID NO: 8027) |
| KRAS-3913 Target: | 5′-CAGACAAGGAAACTTCTATGT-3′ |
| | (SEQ ID NO: 8028) |
| KRAS-3914 Target: | 5′-AGACAAGGAAACTTCTATGTA-3′ |
| | (SEQ ID NO: 8029) |
| KRAS-3915 Target: | 5′-GACAAGGAAACTTCTATGTAA-3′ |
| | (SEQ ID NO: 8030) |
| KRAS-3924 Target: | 5′-ACTTCTATGTAAAAATCACTA-3′ |
| | (SEQ ID NO: 8031) |
| KRAS-3925 Target: | 5′-CTTCTATGTAAAAATCACTAT-3′ |
| | (SEQ ID NO: 8032) |
| KRAS-3926 Target: | 5′-TTCTATGTAAAAATCACTATG-3′ |
| | (SEQ ID NO: 8033) |
| KRAS-3930 Target: | 5′-ATGTAAAAATCACTATGATTT-3′ |
| | (SEQ ID NO: 8034) |
| KRAS-3931 Target: | 5′-TGTAAAAATCACTATGATTTC-3′ |
| | (SEQ ID NO: 8035) |
| KRAS-3940 Target: | 5′-CACTATGATTTCTGAATTGCT-3′ |
| | (SEQ ID NO: 8036) |
| KRAS-3941 Target: | 5′-ACTATGATTTCTGAATTGCTA-3′ |
| | (SEQ ID NO: 8037) |
| KRAS-3958 Target: | 5′-GCTATGTGAAACTACAGATCT-3′ |
| | (SEQ ID NO: 8038) |
| KRAS-3959 Target: | 5′-CTATGTGAAACTACAGATCTT-3′ |
| | (SEQ ID NO: 8039) |
| KRAS-3995 Target: | 5′-GTAGGGTGTTAAGACTTACAC-3′ |
| | (SEQ ID NO: 8040) |
| KRAS-4082 Target: | 5′-TATTTAGGCCTCTTGAATTTT-3′ |
| | (SEQ ID NO: 8041) |
| KRAS-4090 Target: | 5′-CCTCTTGAATTTTTGATGTAG-3′ |
| | (SEQ ID NO: 8042) |
| KRAS-4091 Target: | 5′-CTCTTGAATTTTTGATGTAGA-3′ |
| | (SEQ ID NO: 8043) |
| KRAS-4106 Target: | 5′-TGTAGATGGGCATTTTTTTAA-3′ |
| | (SEQ ID NO: 8044) |
| KRAS-4112 Target: | 5′-TGGGCATTTTTTTAAGGTAGT-3′ |
| | (SEQ ID NO: 8045) |
| KRAS-4124 Target: | 5′-TAAGGTAGTGGTTAATTACCT-3′ |
| | (SEQ ID NO: 8046) |
| KRAS-4126 Target: | 5′-AGGTAGTGGTTAATTACCTTT-3′ |
| | (SEQ ID NO: 8047) |
| KRAS-4127 Target: | 5′-GGTAGTGGTTAATTACCTTTA-3′ |
| | (SEQ ID NO: 8048) |
| KRAS-4128 Target: | 5′-GTAGTGGTTAATTACCTTTAT-3′ |
| | (SEQ ID NO: 8049) |
| KRAS-4129 Target: | 5′-TAGTGGTTAATTACCTTTATG-3′ |
| | (SEQ ID NO: 8050) |
| KRAS-4139 Target: | 5′-TTACCTTTATGTGAACTTTGA-3′ |
| | (SEQ ID NO: 8051) |
| KRAS-4144 Target: | 5′-TTTATGTGAACTTTGAATGGT-3′ |
| | (SEQ ID NO: 8052) |
| KRAS-4150 Target: | 5′-TGAACTTTGAATGGTTTAACA-3′ |
| | (SEQ ID NO: 8053) |
| KRAS-4154 Target: | 5′-CTTTGAATGGTTTAACAAAAG-3′ |
| | (SEQ ID NO: 8054) |
| KRAS-4155 Target: | 5′-TTTGAATGGTTTAACAAAAGA-3′ |
| | (SEQ ID NO: 8055) |
| KRAS-4156 Target: | 5′-TTGAATGGTTTAACAAAAGAT-3′ |
| | (SEQ ID NO: 8056) |
| KRAS-4157 Target: | 5′-TGAATGGTTTAACAAAAGATT-3′ |
| | (SEQ ID NO: 8057) |
| KRAS-4158 Target: | 5′-GAATGGTTTAACAAAAGATTT-3′ |
| | (SEQ ID NO: 8058) |
| KRAS-4160 Target: | 5′-ATGGTTTAACAAAAGATTTGT-3′ |
| | (SEQ ID NO: 8059) |
| KRAS-4161 Target: | 5′-TGGTTTAACAAAAGATTTGTT-3′ |
| | (SEQ ID NO: 8060) |
| KRAS-4165 Target: | 5′-TTAACAAAAGATTTGTTTTTG-3′ |
| | (SEQ ID NO: 8061) |
| KRAS-4166 Target: | 5′-TAACAAAAGATTTGTTTTTGT-3′ |
| | (SEQ ID NO: 8062) |
| KRAS-4167 Target: | 5′-AACAAAAGATTTGTTTTTGTA-3′ |
| | (SEQ ID NO: 8063) |
| KRAS-4169 Target: | 5′-CAAAAGATTTGTTTTTGTAGA-3′ |
| | (SEQ ID NO: 8064) |
| KRAS-4170 Target: | 5′-AAAAGATTTGTTTTTGTAGAG-3′ |
| | (SEQ ID NO: 8065) |
| KRAS-4171 Target: | 5′-AAAGATTTGTTTTTGTAGAGA-3′ |
| | (SEQ ID NO: 8066) |
| KRAS-4172 Target: | 5′-AAGATTTGTTTTTGTAGAGAT-3′ |
| | (SEQ ID NO: 8067) |
| KRAS-4178 Target: | 5′-TGTTTTTGTAGAGATTTTAAA-3′ |
| | (SEQ ID NO: 8068) |
| KRAS-4195 Target: | 5′-TAAAGGGGGAGAATTCTAGAA-3′ |
| | (SEQ ID NO: 8069) |
| KRAS-4197 Target: | 5′-AAGGGGGAGAATTCTAGAAAT-3′ |
| | (SEQ ID NO: 8070) |
| KRAS-4198 Target: | 5′-AGGGGGAGAATTCTAGAAATA-3′ |
| | (SEQ ID NO: 8071) |
| KRAS-4199 Target: | 5′-GGGGGAGAATTCTAGAAATAA-3′ |
| | (SEQ ID NO: 8072) |
| KRAS-4200 Target: | 5′-GGGGAGAATTCTAGAAATAAA-3′ |
| | (SEQ ID NO: 8073) |
| KRAS-4201 Target: | 5′-GGGAGAATTCTAGAAATAAAT-3′ |
| | (SEQ ID NO: 8074) |
| KRAS-4206 Target: | 5′-AATTCTAGAAATAAATGTTAC-3′ |
| | (SEQ ID NO: 8075) |
| KRAS-4207 Target: | 5′-ATTCTAGAAATAAATGTTACC-3′ |
| | (SEQ ID NO: 8076) |
| KRAS-4208 Target: | 5′-TTCTAGAAATAAATGTTACCT-3′ |
| | (SEQ ID NO: 8077) |
| KRAS-4209 Target: | 5′-TCTAGAAATAAATGTTACCTA-3′ |
| | (SEQ ID NO: 8078) |
| KRAS-4210 Target: | 5′-CTAGAAATAAATGTTACCTAA-3′ |
| | (SEQ ID NO: 8079) |
| KRAS-4212 Target: | 5′-AGAAATAAATGTTACCTAATT-3′ |
| | (SEQ ID NO: 8080) |
| KRAS-4223 Target: | 5′-TTACCTAATTATTACAGCCTT-3′ |
| | (SEQ ID NO: 8081) |
| KRAS-4224 Target: | 5′-TACCTAATTATTACAGCCTTA-3′ |
| | (SEQ ID NO: 8082) |
| KRAS-4238 Target: | 5′-AGCCTTAAAGACAAAAATCCT-3′ |
| | (SEQ ID NO: 8083) |
| KRAS-4241 Target: | 5′-CTTAAAGACAAAAATCCTTGT-3′ |
| | (SEQ ID NO: 8084) |
| KRAS-4253 Target: | 5′-AATCCTTGTTGAAGTTTTTTT-3′ |
| | (SEQ ID NO: 8085) |
| KRAS-4254 Target: | 5′-ATCCTTGTTGAAGTTTTTTTA-3′ |
| | (SEQ ID NO: 8086) |
| KRAS-4256 Target: | 5′-CCTTGTTGAAGTTTTTTTAAA-3′ |
| | (SEQ ID NO: 8087) |
| KRAS-4257 Target: | 5′-CTTGTTGAAGTTTTTTTAAAA-3′ |
| | (SEQ ID NO: 8088) |
| KRAS-4261 Target: | 5′-TTGAAGTTTTTTTAAAAAAAG-3′ |
| | (SEQ ID NO: 8089) |
| KRAS-4262 Target: | 5′-TGAAGTTTTTTTAAAAAAAGC-3′ |
| | (SEQ ID NO: 8090) |
| KRAS-4263 Target: | 5′-GAAGTTTTTTTAAAAAAAGCT-3′ |
| | (SEQ ID NO: 8091) |
| KRAS-4264 Target: | 5′-AAGTTTTTTTAAAAAAAGCTA-3′ |
| | (SEQ ID NO: 8092) |
| KRAS-4265 Target: | 5′-AGTTTTTTTAAAAAAAGCTAA-3′ |
| | (SEQ ID NO: 8093) |
| KRAS-4269 Target: | 5′-TTTTTAAAAAAAGCTAAATTA-3′ |
| | (SEQ ID NO: 8094) |
| KRAS-4271 Target: | 5′-TTTAAAAAAAGCTAAATTACA-3′ |
| | (SEQ ID NO: 8095) |
| KRAS-4293 Target: | 5′-AGACTTAGGCATTAACATGTT-3′ |
| | (SEQ ID NO: 8096) |
| KRAS-4294 Target: | 5′-GACTTAGGCATTAACATGTTT-3′ |
| | (SEQ ID NO: 8097) |
| KRAS-4325 Target: | 5′-ATAGCAGACGTATATTGTATC-3′ |
| | (SEQ ID NO: 8098) |
| KRAS-4329 Target: | 5′-CAGACGTATATTGTATCATTT-3′ |
| | (SEQ ID NO: 8099) |
| KRAS-4331 Target: | 5′-GACGTATATTGTATCATTTGA-3′ |
| | (SEQ ID NO: 8100) |
| KRAS-4334 Target: | 5′-GTATATTGTATCATTTGAGTG-3′ |
| | (SEQ ID NO: 8101) |
| KRAS-4335 Target: | 5′-TATATTGTATCATTTGAGTGA-3′ |
| | (SEQ ID NO: 8102) |
| KRAS-4336 Target: | 5′-ATATTGTATCATTTGAGTGAA-3′ |
| | (SEQ ID NO: 8103) |
| KRAS-4402 Target: | 5′-GCATAGGAATTTAGAACCTAA-3′ |
| | (SEQ ID NO: 8104) |
| KRAS-4403 Target: | 5′-CATAGGAATTTAGAACCTAAC-3′ |
| | (SEQ ID NO: 8105) |
| KRAS-4407 Target: | 5′-GGAATTTAGAACCTAACTTTT-3′ |
| | (SEQ ID NO: 8106) |
| KRAS-4408 Target: | 5′-GAATTTAGAACCTAACTTTTA-3′ |
| | (SEQ ID NO: 8107) |
| KRAS-4409 Target: | 5′-AATTTAGAACCTAACTTTTAT-3′ |
| | (SEQ ID NO: 8108) |
| KRAS-4410 Target: | 5′-ATTTAGAACCTAACTTTTATA-3′ |
| | (SEQ ID NO: 8109) |
| KRAS-4422 Target: | 5′-ACTTTTATAGGTTATCAAAAC-3′ |
| | (SEQ ID NO: 8110) |
| KRAS-4424 Target: | 5′-TTTTATAGGTTATCAAAACTG-3′ |
| | (SEQ ID NO: 8111) |
| KRAS-4458 Target: | 5′-ACAATTTTGTCCTAATATATA-3′ |
| | (SEQ ID NO: 8112) |
| KRAS-4459 Target: | 5′-CAATTTTGTCCTAATATATAC-3′ |
| | (SEQ ID NO: 8113) |
| KRAS-4460 Target: | 5′-AATTTTGTCCTAATATATACA-3′ |
| | (SEQ ID NO: 8114) |
| KRAS-4466 Target: | 5′-GTCCTAATATATACATAGAAA-3′ |
| | (SEQ ID NO: 8115) |
| KRAS-4471 Target: | 5′-AATATATACATAGAAACTTTG-3′ |
| | (SEQ ID NO: 8116) |
| KRAS-4514 Target: | 5′-TGCACAAGTTCATCTCATTTG-3′ |
| | (SEQ ID NO: 8117) |
| KRAS-4525 Target: | 5′-ATCTCATTTGTATTCCATTGA-3′ |
| | (SEQ ID NO: 8118) |
| KRAS-4526 Target: | 5′-TCTCATTTGTATTCCATTGAT-3′ |
| | (SEQ ID NO: 8119) |
| KRAS-4527 Target: | 5′-CTCATTTGTATTCCATTGATT-3′ |
| | (SEQ ID NO: 8120) |
| KRAS-4528 Target: | 5′-TCATTTGTATTCCATTGATTT-3′ |
| | (SEQ ID NO: 8121) |
| KRAS-4529 Target: | 5′-CATTTGTATTCCATTGATTTT-3′ |
| | (SEQ ID NO: 8122) |
| KRAS-4530 Target: | 5′-ATTTGTATTCCATTGATTTTT-3′ |
| | (SEQ ID NO: 8123) |
| KRAS-4531 Target: | 5′-TTTGTATTCCATTGATTTTTT-3′ |
| | (SEQ ID NO: 8124) |
| KRAS-4538 Target: | 5′-TCCATTGATTTTTTTTTTCTT-3′ |
| | (SEQ ID NO: 8125) |
| KRAS-4539 Target: | 5′-CCATTGATTTTTTTTTTCTTC-3′ |
| | (SEQ ID NO: 8126) |
| KRAS-4543 Target: | 5′-TGATTTTTTTTTTCTTCTAAA-3′ |
| | (SEQ ID NO: 8127) |
| KRAS-4544 Target: | 5′-GATTTTTTTTTTCTTCTAAAC-3′ |
| | (SEQ ID NO: 8128) |
| KRAS-4545 Target: | 5′-ATTTTTTTTTTCTTCTAAACA-3′ |
| | (SEQ ID NO: 8129) |
| KRAS-4546 Target: | 5′-TTTTTTTTTTCTTCTAAACAT-3′ |
| | (SEQ ID NO: 8130) |
| KRAS-4547 Target: | 5′-TTTTTTTTTCTTCTAAACATT-3′ |
| | (SEQ ID NO: 8131) |
| KRAS-4560 Target: | 5′-TAAACATTTTTTCTTCAAACA-3′ |
| | (SEQ ID NO: 8132) |
| KRAS-4561 Target: | 5′-AAACATTTTTTCTTCAAACAG-3′ |
| | (SEQ ID NO: 8133) |
| KRAS-4562 Target: | 5′-AACATTTTTTCTTCAAACAGT-3′ |
| | (SEQ ID NO: 8134) |
| KRAS-4563 Target: | 5′-ACATTTTTTCTTCAAACAGTA-3′ |
| | (SEQ ID NO: 8135) |
| KRAS-4564 Target: | 5′-CATTTTTTCTTCAAACAGTAT-3′ |
| | (SEQ ID NO: 8136) |
| KRAS-4571 Target: | 5′-TCTTCAAACAGTATATAACTT-3′ |
| | (SEQ ID NO: 8137) |
| KRAS-4576 Target: | 5′-AAACAGTATATAACTTTTTTT-3′ |
| | (SEQ ID NO: 8138) |
| KRAS-4577 Target: | 5′-AACAGTATATAACTTTTTTTA-3′ |
| | (SEQ ID NO: 8139) |
| KRAS-4578 Target: | 5′-ACAGTATATAACTTTTTTTAG-3′ |
| | (SEQ ID NO: 8140) |
| KRAS-4579 Target: | 5′-CAGTATATAACTTTTTTTAGG-3′ |
| | (SEQ ID NO: 8141) |
| KRAS-4585 Target: | 5′-ATAACTTTTTTTAGGGGATTT-3′ |
| | (SEQ ID NO: 8142) |
| KRAS-4586 Target: | 5′-TAACTTTTTTTAGGGGATTTT-3′ |
| | (SEQ ID NO: 8143) |
| KRAS-4597 Target: | 5′-AGGGGATTTTTTTTTAGACAG-3′ |
| | (SEQ ID NO: 8144) |
| KRAS-4598 Target: | 5′-GGGGATTTTTTTTTAGACAGC-3′ |
| | (SEQ ID NO: 8145) |
| KRAS-4599 Target: | 5′-GGGATTTTTTTTTAGACAGCA-3′ |
| | (SEQ ID NO: 8146) |
| KRAS-4627 Target: | 5′-TCTGAAGATTTCCATTTGTCA-3′ |
| | (SEQ ID NO: 8147) |
| KRAS-4628 Target: | 5′-CTGAAGATTTCCATTTGTCAA-3′ |
| | (SEQ ID NO: 8148) |
| KRAS-4629 Target: | 5′-TGAAGATTTCCATTTGTCAAA-3′ |
| | (SEQ ID NO: 8149) |
| KRAS-4630 Target: | 5′-GAAGATTTCCATTTGTCAAAA-3′ |
| | (SEQ ID NO: 8150) |
| KRAS-4635 Target: | 5′-TTTCCATTTGTCAAAAAGTAA-3′ |
| | (SEQ ID NO: 8151) |
| KRAS-4636 Target: | 5′-TTCCATTTGTCAAAAAGTAAT-3′ |
| | (SEQ ID NO: 8152) |
| KRAS-4637 Target: | 5′-TCCATTTGTCAAAAAGTAATG-3′ |
| | (SEQ ID NO: 8153) |
| KRAS-4642 Target: | 5′-TTGTCAAAAAGTAATGATTTC-3′ |
| | (SEQ ID NO: 8154) |
| KRAS-4643 Target: | 5′-TGTCAAAAAGTAATGATTTCT-3′ |
| | (SEQ ID NO: 8155) |
| KRAS-4644 Target: | 5′-GTCAAAAAGTAATGATTTCTT-3′ |
| | (SEQ ID NO: 8156) |
| KRAS-4645 Target: | 5′-TCAAAAAGTAATGATTTCTTG-3′ |
| | (SEQ ID NO: 8157) |
| KRAS-4647 Target: | 5′-AAAAAGTAATGATTTCTTGAT-3′ |
| | (SEQ ID NO: 8158) |
| KRAS-4649 Target: | 5′-AAAGTAATGATTTCTTGATAA-3′ |
| | (SEQ ID NO: 8159) |
| KRAS-4650 Target: | 5′-AAGTAATGATTTCTTGATAAT-3′ |
| | (SEQ ID NO: 8160) |
| KRAS-4652 Target: | 5′-GTAATGATTTCTTGATAATTG-3′ |
| | (SEQ ID NO: 8161) |
| KRAS-4653 Target: | 5′-TAATGATTTCTTGATAATTGT-3′ |
| | (SEQ ID NO: 8162) |
| KRAS-4658 Target: | 5′-ATTTCTTGATAATTGTGTAGT-3′ |
| | (SEQ ID NO: 8163) |
| KRAS-4659 Target: | 5′-TTTCTTGATAATTGTGTAGTA-3′ |
| | (SEQ ID NO: 8164) |
| KRAS-4660 Target: | 5′-TTCTTGATAATTGTGTAGTAA-3′ |
| | (SEQ ID NO: 8165) |
| KRAS-4662 Target: | 5′-CTTGATAATTGTGTAGTAATG-3′ |
| | (SEQ ID NO: 8166) |
| KRAS-4665 Target: | 5′-GATAATTGTGTAGTAATGTTT-3′ |
| | (SEQ ID NO: 8167) |
| KRAS-4667 Target: | 5′-TAATTGTGTAGTAATGTTTTT-3′ |
| | (SEQ ID NO: 8168) |
| KRAS-4668 Target: | 5′-AATTGTGTAGTAATGTTTTTT-3′ |
| | (SEQ ID NO: 8169) |
| KRAS-4702 Target: | 5′-TACCTTAAAGCTGAATTTATA-3′ |
| | (SEQ ID NO: 8170) |
| KRAS-4704 Target: | 5′-CCTTAAAGCTGAATTTATATT-3′ |
| | (SEQ ID NO: 8171) |
| KRAS-4713 Target: | 5′-TGAATTTATATTTAGTAACTT-3′ |
| | (SEQ ID NO: 8172) |
| KRAS-4714 Target: | 5′-GAATTTATATTTAGTAACTTC-3′ |
| | (SEQ ID NO: 8173) |
| KRAS-4715 Target: | 5′-AATTTATATTTAGTAACTTCT-3′ |
| | (SEQ ID NO: 8174) |
| KRAS-4720 Target: | 5′-ATATTTAGTAACTTCTGTGTT-3′ |
| | (SEQ ID NO: 8175) |
| KRAS-4771 Target: | 5′-AAACTGAATAGCTGTCATAAA-3′ |
| | (SEQ ID NO: 8176) |
| KRAS-4772 Target: | 5′-AACTGAATAGCTGTCATAAAA-3′ |
| | (SEQ ID NO: 8177) |
| KRAS-4786 Target: | 5′-CATAAAATGAAACTTTCTTTC-3′ |
| | (SEQ ID NO: 8178) |
| KRAS-4787 Target: | 5′-ATAAAATGAAACTTTCTTTCT-3′ |
| | (SEQ ID NO: 8179) |
| KRAS-4788 Target: | 5′-TAAAATGAAACTTTCTTTCTA-3′ |
| | (SEQ ID NO: 8180) |
| KRAS-4790 Target: | 5′-AAATGAAACTTTCTTTCTAAA-3′ |
| | (SEQ ID NO: 8181) |
| KRAS-4794 Target: | 5′-GAAACTTTCTTTCTAAAGAAA-3′ |
| | (SEQ ID NO: 8182) |
| KRAS-4819 Target: | 5′-CTCACATGAGTTCTTGAAGAA-3′ |
| | (SEQ ID NO: 8183) |
| KRAS-4828 Target: | 5′-GTTCTTGAAGAATAGTCATAA-3′ |
| | (SEQ ID NO: 8184) |
| KRAS-4829 Target: | 5′-TTCTTGAAGAATAGTCATAAC-3′ |
| | (SEQ ID NO: 8185) |
| KRAS-4830 Target: | 5′-TCTTGAAGAATAGTCATAACT-3′ |
| | (SEQ ID NO: 8186) |
| KRAS-4833 Target: | 5′-TGAAGAATAGTCATAACTAGA-3′ |
| | (SEQ ID NO: 8187) |
| KRAS-4834 Target: | 5′-GAAGAATAGTCATAACTAGAT-3′ |
| | (SEQ ID NO: 8188) |
| KRAS-4835 Target: | 5′-AAGAATAGTCATAACTAGATT-3′ |
| | (SEQ ID NO: 8189) |
| KRAS-4836 Target: | 5′-AGAATAGTCATAACTAGATTA-3′ |
| | (SEQ ID NO: 8190) |
| KRAS-4840 Target: | 5′-TAGTCATAACTAGATTAAGAT-3′ |
| | (SEQ ID NO: 8191) |
| KRAS-4846 Target: | 5′-TAACTAGATTAAGATCTGTGT-3′ |
| | (SEQ ID NO: 8192) |
| KRAS-4848 Target: | 5′-ACTAGATTAAGATCTGTGTTT-3′ |
| | (SEQ ID NO: 8193) |
| KRAS-4849 Target: | 5′-CTAGATTAAGATCTGTGTTTT-3′ |
| | (SEQ ID NO: 8194) |
| KRAS-4851 Target: | 5′-AGATTAAGATCTGTGTTTTAG-3′ |
| | (SEQ ID NO: 8195) |
| KRAS-4858 Target: | 5′-GATCTGTGTTTTAGTTTAATA-3′ |
| | (SEQ ID NO: 8196) |
| KRAS-4859 Target: | 5′-ATCTGTGTTTTAGTTTAATAG-3′ |
| | (SEQ ID NO: 8197) |
| KRAS-4861 Target: | 5′-CTGTGTTTTAGTTTAATAGTT-3′ |
| | (SEQ ID NO: 8198) |
| KRAS-4863 Target: | 5′-GTGTTTTAGTTTAATAGTTTG-3′ |
| | (SEQ ID NO: 8199) |
| KRAS-4864 Target: | 5′-TGTTTTAGTTTAATAGTTTGA-3′ |
| | (SEQ ID NO: 8200) |
| KRAS-4890 Target: | 5′-CTGTTTGGGATAATGATAGGT-3′ |
| | (SEQ ID NO: 8201) |
| KRAS-4892 Target: | 5′-GTTTGGGATAATGATAGGTAA-3′ |
| | (SEQ ID NO: 8202) |
| KRAS-4895 Target: | 5′-TGGGATAATGATAGGTAATTT-3′ |
| | (SEQ ID NO: 8203) |
| KRAS-4896 Target: | 5′-GGGATAATGATAGGTAATTTA-3′ |
| | (SEQ ID NO: 8204) |
| KRAS-4899 Target: | 5′-ATAATGATAGGTAATTTAGAT-3′ |
| | (SEQ ID NO: 8205) |
| KRAS-4900 Target: | 5′-TAATGATAGGTAATTTAGATG-3′ |
| | (SEQ ID NO: 8206) |
| KRAS-4905 Target: | 5′-ATAGGTAATTTAGATGAATTT-3′ |
| | (SEQ ID NO: 8207) |
| KRAS-4907 Target: | 5′-AGGTAATTTAGATGAATTTAG-3′ |
| | (SEQ ID NO: 8208) |
| KRAS-4914 Target: | 5′-TTAGATGAATTTAGGGGAAAA-3′ |
| | (SEQ ID NO: 8209) |
| KRAS-4915 Target: | 5′-TAGATGAATTTAGGGGAAAAA-3′ |
| | (SEQ ID NO: 8210) |
| KRAS-4926 Target: | 5′-AGGGGAAAAAAAAGTTATCTG-3′ |
| | (SEQ ID NO: 8211) |
| KRAS-4927 Target: | 5′-GGGGAAAAAAAAGTTATCTGC-3′ |
| | (SEQ ID NO: 8212) |
| KRAS-4932 Target: | 5′-AAAAAAAGTTATCTGCAGATA-3′ |
| | (SEQ ID NO: 8213) |
| KRAS-5033 Target: | 5′-CTGTCTTGTGTTTTCATGTTG-3′ |
| | (SEQ ID NO: 8214) |
| KRAS-5034 Target: | 5′-TGTCTTGTGTTTTCATGTTGA-3′ |
| | (SEQ ID NO: 8215) |
| KRAS-5035 Target: | 5′-GTCTTGTGTTTTCATGTTGAA-3′ |
| | (SEQ ID NO: 8216) |
| KRAS-5045 Target: | 5′-TTCATGTTGAAAATACTTTTG-3′ |
| | (SEQ ID NO: 8217) |
| KRAS-5046 Target: | 5′-TCATGTTGAAAATACTTTTGC-3′ |
| | (SEQ ID NO: 8218) |
| KRAS-5047 Target: | 5′-CATGTTGAAAATACTTTTGCA-3′ |
| | (SEQ ID NO: 8219) |
| KRAS-5048 Target: | 5′-ATGTTGAAAATACTTTTGCAT-3′ |
| | (SEQ ID NO: 8220) |
| KRAS-5058 Target: | 5′-TACTTTTGCATTTTTCCTTTG-3′ |
| | (SEQ ID NO: 8221) |
| KRAS-5075 Target: | 5′-TTTGAGTGCCAATTTCTTACT-3′ |
| | (SEQ ID NO: 8222) |
| KRAS-5080 Target: | 5′-GTGCCAATTTCTTACTAGTAC-3′ |
| | (SEQ ID NO: 8223) |
| KRAS-5081 Target: | 5′-TGCCAATTTCTTACTAGTACT-3′ |
| | (SEQ ID NO: 8224) |
| KRAS-5090 Target: | 5′-CTTACTAGTACTATTTCTTAA-3′ |
| | (SEQ ID NO: 8225) |
| KRAS-5091 Target: | 5′-TTACTAGTACTATTTCTTAAT-3′ |
| | (SEQ ID NO: 8226) |
| KRAS-5096 Target: | 5′-AGTACTATTTCTTAATGTAAC-3′ |
| | (SEQ ID NO: 8227) |
| KRAS-5097 Target: | 5′-GTACTATTTCTTAATGTAACA-3′ |
| | (SEQ ID NO: 8228) |
| KRAS-5098 Target: | 5′-TACTATTTCTTAATGTAACAT-3′ |
| | (SEQ ID NO: 8229) |
| KRAS-5105 Target: | 5′-TCTTAATGTAACATGTTTACC-3′ |
| | (SEQ ID NO: 8230) |
| KRAS-5122 Target: | 5′-TACCTGGAATGTATTTTAACT-3′ |
| | (SEQ ID NO: 8231) |
| KRAS-5124 Target: | 5′-CCTGGAATGTATTTTAACTAT-3′ |
| | (SEQ ID NO: 8232) |
| KRAS-5125 Target: | 5′-CTGGAATGTATTTTAACTATT-3′ |
| | (SEQ ID NO: 8233) |
| KRAS-5126 Target: | 5′-TGGAATGTATTTTAACTATTT-3′ |
| | (SEQ ID NO: 8234) |
| KRAS-5127 Target: | 5′-GGAATGTATTTTAACTATTTT-3′ |
| | (SEQ ID NO: 8235) |
| KRAS-5129 Target: | 5′-AATGTATTTTAACTATTTTTG-3′ |
| | (SEQ ID NO: 8236) |
| KRAS-5131 Target: | 5′-TGTATTTTAACTATTTTTGTA-3′ |
| | (SEQ ID NO: 8237) |
| KRAS-5132 Target: | 5′-GTATTTTAACTATTTTTGTAT-3′ |
| | (SEQ ID NO: 8238) |
| KRAS-5133 Target: | 5′-TATTTTAACTATTTTTGTATA-3′ |
| | (SEQ ID NO: 8239) |
| KRAS-5140 Target: | 5′-ACTATTTTTGTATAGTGTAAA-3′ |
| | (SEQ ID NO: 8240) |
| KRAS-5141 Target: | 5′-CTATTTTTGTATAGTGTAAAC-3′ |
| | (SEQ ID NO: 8241) |
| KRAS-5142 Target: | 5′-TATTTTTGTATAGTGTAAACT-3′ |
| | (SEQ ID NO: 8242) |
| KRAS-5157 Target: | 5′-TAAACTGAAACATGCACATTT-3′ |
| | (SEQ ID NO: 8243) |
| KRAS-5163 Target: | 5′-GAAACATGCACATTTTGTACA-3′ |
| | (SEQ ID NO: 8244) |
| KRAS-5216 Target: | 5′-GATCCAGTTGTTTTCCATCAT-3′ |
| | (SEQ ID NO: 8245) |
| KRAS-5218 Target: | 5′-TCCAGTTGTTTTCCATCATTT-3′ |
| | (SEQ ID NO: 8246) |
| KRAS-5255 Target: | 5′-GAATGTTGGTCATATCAAACA-3′ |
| | (SEQ ID NO: 8247) |
| KRAS-5256 Target: | 5′-AATGTTGGTCATATCAAACAT-3′ |
| | (SEQ ID NO: 8248) |
| KRAS-5257 Target: | 5′-ATGTTGGTCATATCAAACATT-3′ |
| | (SEQ ID NO: 8249) |
| KRAS-5261 Target: | 5′-TGGTCATATCAAACATTAAAA-3′ |
| | (SEQ ID NO: 8250) |
| KRAS-5277 Target: | 5′-TAAAAATGACCACTCTTTTAA-3′ |
| | (SEQ ID NO: 8251) |
| KRAS-5278 Target: | 5′-AAAAATGACCACTCTTTTAAT-3′ |
| | (SEQ ID NO: 8252) |
| KRAS-5287 Target: | 5′-CACTCTTTTAATTGAAATTAA-3′ |
| | (SEQ ID NO: 8253) |
| KRAS-5288 Target: | 5′-ACTCTTTTAATTGAAATTAAC-3′ |
| | (SEQ ID NO: 8254) |
| KRAS-5290 Target: | 5′-TCTTTTAATTGAAATTAACTT-3′ |
| | (SEQ ID NO: 8255) |
| KRAS-5292 Target: | 5′-TTTTAATTGAAATTAACTTTT-3′ |
| | (SEQ ID NO: 8256) |
| KRAS-5293 Target: | 5′-TTTAATTGAAATTAACTTTTA-3′ |
| | (SEQ ID NO: 8257) |
| KRAS-5294 Target: | 5′-TTAATTGAAATTAACTTTTAA-3′ |
| | (SEQ ID NO: 8258) |
| KRAS-5295 Target: | 5′-TAATTGAAATTAACTTTTAAA-3′ |
| | (SEQ ID NO: 8259) |
| KRAS-5296 Target: | 5′-AATTGAAATTAACTTTTAAAT-3′ |
| | (SEQ ID NO: 8260) |
| KRAS-5297 Target: | 5′-ATTGAAATTAACTTTTAAATG-3′ |
| | (SEQ ID NO: 8261) |
| KRAS-5300 Target: | 5′-GAAATTAACTTTTAAATGTTT-3′ |
| | (SEQ ID NO: 8262) |
| KRAS-5304 Target: | 5′-TTAACTTTTAAATGTTTATAG-3′ |
| | (SEQ ID NO: 8263) |
| KRAS-5308 Target: | 5′-CTTTTAAATGTTTATAGGAGT-3′ |
| | (SEQ ID NO: 8264) |
| KRAS-5309 Target: | 5′-TTTTAAATGTTTATAGGAGTA-3′ |
| | (SEQ ID NO: 8265) |
| KRAS-5331 Target: | 5′-GTGCTGTGAAGTGATCTAAAA-3′ |
| | (SEQ ID NO: 8266) |
| KRAS-5333 Target: | 5′-GCTGTGAAGTGATCTAAAATT-3′ |
| | (SEQ ID NO: 8267) |
| KRAS-5334 Target: | 5′-CTGTGAAGTGATCTAAAATTT-3′ |
| | (SEQ ID NO: 8268) |
| KRAS-5335 Target: | 5′-TGTGAAGTGATCTAAAATTTG-3′ |
| | (SEQ ID NO: 8269) |
| KRAS-5336 Target: | 5′-GTGAAGTGATCTAAAATTTGT-3′ |
| | (SEQ ID NO: 8270) |
| KRAS-5337 Target: | 5′-TGAAGTGATCTAAAATTTGTA-3′ |
| | (SEQ ID NO: 8271) |
| KRAS-5338 Target: | 5′-GAAGTGATCTAAAATTTGTAA-3′ |
| | (SEQ ID NO: 8272) |
| KRAS-5342 Target: | 5′-TGATCTAAAATTTGTAATATT-3′ |
| | (SEQ ID NO: 8273) |
| KRAS-5343 Target: | 5′-GATCTAAAATTTGTAATATTT-3′ |
| | (SEQ ID NO: 8274) |
| KRAS-5347 Target: | 5′-TAAAATTTGTAATATTTTTGT-3′ |
| | (SEQ ID NO: 8275) |
| KRAS-5348 Target: | 5′-AAAATTTGTAATATTTTTGTC-3′ |
| | (SEQ ID NO: 8276) |
| KRAS-5349 Target: | 5′-AAATTTGTAATATTTTTGTCA-3′ |
| | (SEQ ID NO: 8277) |
| KRAS-5353 Target: | 5′-TTGTAATATTTTTGTCATGAA-3′ |
| | (SEQ ID NO: 8278) |
| KRAS-5354 Target: | 5′-TGTAATATTTTTGTCATGAAC-3′ |
| | (SEQ ID NO: 8279) |
| KRAS-5370 Target: | 5′-TGAACTGTACTACTCCTAATT-3′ |
| | (SEQ ID NO: 8280) |
| KRAS-5371 Target: | 5′-GAACTGTACTACTCCTAATTA-3′ |
| | (SEQ ID NO: 8281) |
| KRAS-5381 Target: | 5′-ACTCCTAATTATTGTAATGTA-3′ |
| | (SEQ ID NO: 8282) |
| KRAS-5382 Target: | 5′-CTCCTAATTATTGTAATGTAA-3′ |
| | (SEQ ID NO: 8283) |
| KRAS-5384 Target: | 5′-CCTAATTATTGTAATGTAATA-3′ |
| | (SEQ ID NO: 8284) |
| KRAS-5386 Target: | 5′-TAATTATTGTAATGTAATAAA-3′ |
| | (SEQ ID NO: 8285) |
| KRAS-5387 Target: | 5′-AATTATTGTAATGTAATAAAA-3′ |
| | (SEQ ID NO: 8286) |
| KRAS-5389 Target: | 5′-TTATTGTAATGTAATAAAAAT-3′ |
| | (SEQ ID NO: 8287) |
| KRAS-5390 Target: | 5′-TATTGTAATGTAATAAAAATA-3′ |
| | (SEQ ID NO: 8288) |
| KRAS-5394 Target: | 5′-GTAATGTAATAAAAATAGTTA-3′ |
| | (SEQ ID NO: 8289) |
| KRAS-5395 Target: | 5′-TAATGTAATAAAAATAGTTAC-3′ |
| | (SEQ ID NO: 8290) |
| KRAS-5396 Target: | 5′-AATGTAATAAAAATAGTTACA-3′ |
| | (SEQ ID NO: 8291) |
| KRAS-5404 Target: | 5′-AAAAATAGTTACAGTGACAAA-3′ |
| | (SEQ ID NO: 8292) |
| KRAS-5405 Target: | 5′-AAAATAGTTACAGTGACAAAA-3′ |
| | (SEQ ID NO: 8293) |
| KRAS-5407 Target: | 5′-AATAGTTACAGTGACAAAAAA-3′ |
| | (SEQ ID NO: 8294) |
| KRAS-166 Target: | 5′-GAGAGGCCTGCTGAAAATGAC-3′ |
| | (SEQ ID NO: 8295) |
| KRAS-167 Target: | 5′-AGAGGCCTGCTGAAAATGACT-3′ |
| | (SEQ ID NO: 8296) |
| KRAS-168 Target: | 5′-GAGGCCTGCTGAAAATGACTG-3′ |
| | (SEQ ID NO: 8297) |
| KRAS-169 Target: | 5′-AGGCCTGCTGAAAATGACTGA-3′ |
| | (SEQ ID NO: 8298) |
| KRAS-204 Target: | 5′-TAGTTGGAGCTGGTGGCGTAG-3′ |
| | (SEQ ID NO: 8299) |
| KRAS-205 Target: | 5′-AGTTGGAGCTGGTGGCGTAGG-3′ |
| | (SEQ ID NO: 8300) |
| KRAS-206 Target: | 5′-GTTGGAGCTGGTGGCGTAGGC-3′ |
| | (SEQ ID NO: 8301) |
| KRAS-207 Target: | 5′-TTGGAGCTGGTGGCGTAGGCA-3′ |
| | (SEQ ID NO: 8302) |
| KRAS-208 Target: | 5′-TGGAGCTGGTGGCGTAGGCAA-3′ |
| | (SEQ ID NO: 8303) |
| KRAS-209 Target: | 5′-GGAGCTGGTGGCGTAGGCAAG-3′ |
| | (SEQ ID NO: 8304) |
| KRAS-210 Target: | 5′-GAGCTGGTGGCGTAGGCAAGA-3′ |
| | (SEQ ID NO: 8305) |
| KRAS-241 Target: | 5′-GATACAGCTAATTCAGAATCA-3′ |
| | (SEQ ID NO: 8306) |
| KRAS-313 Target: | 5′-AGTAATTGATGGAGAAACCTG-3′ |
| | (SEQ ID NO: 8307) |
| KRAS-314 Target: | 5′-GTAATTGATGGAGAAACCTGT-3′ |
| | (SEQ ID NO: 8308) |
| KRAS-318 Target: | 5′-TTGATGGAGAAACCTGTCTCT-3′ |
| | (SEQ ID NO: 8309) |
| KRAS-328 Target: | 5′-AACCTGTCTCTTGGATATTCT-3′ |
| | (SEQ ID NO: 8310) |
| KRAS-330 Target: | 5′-CCTGTCTCTTGGATATTCTCG-3′ |
| | (SEQ ID NO: 8311) |
| KRAS-331 Target: | 5′-CTGTCTCTTGGATATTCTCGA-3′ |
| | (SEQ ID NO: 8312) |
| KRAS-332 Target: | 5′-TGTCTCTTGGATATTCTCGAC-3′ |
| | (SEQ ID NO: 8313) |
| KRAS-333 Target: | 5′-GTCTCTTGGATATTCTCGACA-3′ |
| | (SEQ ID NO: 8314) |
| KRAS-334 Target: | 5′-TCTCTTGGATATTCTCGACAC-3′ |
| | (SEQ ID NO: 8315) |
| KRAS-335 Target: | 5′-CTCTTGGATATTCTCGACACA-3′ |
| | (SEQ ID NO: 8316) |
| KRAS-336 Target: | 5′-TCTTGGATATTCTCGACACAG-3′ |
| | (SEQ ID NO: 8317) |
| KRAS-352 Target: | 5′-CACAGCAGGTCAAGAGGAGTA-3′ |
| | (SEQ ID NO: 8318) |
| KRAS-353 Target: | 5′-ACAGCAGGTCAAGAGGAGTAC-3′ |
| | (SEQ ID NO: 8319) |
| KRAS-354 Target: | 5′-CAGCAGGTCAAGAGGAGTACA-3′ |
| | (SEQ ID NO: 8320) |
| KRAS-364 Target: | 5′-AGAGGAGTACAGTGCAATGAG-3′ |
| | (SEQ ID NO: 8321) |
| KRAS-365 Target: | 5′-GAGGAGTACAGTGCAATGAGG-3′ |
| | (SEQ ID NO: 8322) |
| KRAS-366 Target: | 5′-AGGAGTACAGTGCAATGAGGG-3′ |
| | (SEQ ID NO: 8323) |
| KRAS-367 Target: | 5′-GGAGTACAGTGCAATGAGGGA-3′ |
| | (SEQ ID NO: 8324) |
| KRAS-368 Target: | 5′-GAGTACAGTGCAATGAGGGAC-3′ |
| | (SEQ ID NO: 8325) |
| KRAS-369 Target: | 5′-AGTACAGTGCAATGAGGGACC-3′ |
| | (SEQ ID NO: 8326) |
| KRAS-370 Target: | 5′-GTACAGTGCAATGAGGGACCA-3′ |
| | (SEQ ID NO: 8327) |
| KRAS-371 Target: | 5′-TACAGTGCAATGAGGGACCAG-3′ |
| | (SEQ ID NO: 8328) |
| KRAS-372 Target: | 5′-ACAGTGCAATGAGGGACCAGT-3′ |
| | (SEQ ID NO: 8329) |
| KRAS-420 Target: | 5′-GTGTATTTGCCATAAATAATA-3′ |
| | (SEQ ID NO: 8330) |
| KRAS-421 Target: | 5′-TGTATTTGCCATAAATAATAC-3′ |
| | (SEQ ID NO: 8331) |
| KRAS-422 Target: | 5′-GTATTTGCCATAAATAATACT-3′ |
| | (SEQ ID NO: 8332) |
| KRAS-423 Target: | 5′-TATTTGCCATAAATAATACTA-3′ |
| | (SEQ ID NO: 8333) |
| KRAS-424 Target: | 5′-ATTTGCCATAAATAATACTAA-3′ |
| | (SEQ ID NO: 8334) |
| KRAS-425 Target: | 5′-TTTGCCATAAATAATACTAAA-3′ |
| | (SEQ ID NO: 8335) |
| KRAS-426 Target: | 5′-TTGCCATAAATAATACTAAAT-3′ |
| | (SEQ ID NO: 8336) |
| KRAS-436 Target: | 5′-TAATACTAAATCATTTGAAGA-3′ |
| | (SEQ ID NO: 8337) |
| KRAS-437 Target: | 5′-AATACTAAATCATTTGAAGAT-3′ |
| | (SEQ ID NO: 8338) |
| KRAS-438 Target: | 5′-ATACTAAATCATTTGAAGATA-3′ |
| | (SEQ ID NO: 8339) |
| KRAS-439 Target: | 5′-TACTAAATCATTTGAAGATAT-3′ |
| | (SEQ ID NO: 8340) |
| KRAS-440 Target: | 5′-ACTAAATCATTTGAAGATATT-3′ |
| | (SEQ ID NO: 8341) |
| KRAS-441 Target: | 5′-CTAAATCATTTGAAGATATTC-3′ |
| | (SEQ ID NO: 8342) |
| KRAS-442 Target: | 5′-TAAATCATTTGAAGATATTCA-3′ |
| | (SEQ ID NO: 8343) |
| KRAS-443 Target: | 5′-AAATCATTTGAAGATATTCAC-3′ |
| | (SEQ ID NO: 8344) |
| KRAS-444 Target: | 5′-AATCATTTGAAGATATTCACC-3′ |
| | (SEQ ID NO: 8345) |
| KRAS-454 Target: | 5′-AGATATTCACCATTATAGAGA-3′ |
| | (SEQ ID NO: 8346) |
| KRAS-455 Target: | 5′-GATATTCACCATTATAGAGAA-3′ |
| | (SEQ ID NO: 8347) |
| KRAS-456 Target: | 5′-ATATTCACCATTATAGAGAAC-3′ |
| | (SEQ ID NO: 8348) |
| KRAS-457 Target: | 5′-TATTCACCATTATAGAGAACA-3′ |
| | (SEQ ID NO: 8349) |
| KRAS-458 Target: | 5′-ATTCACCATTATAGAGAACAA-3′ |
| | (SEQ ID NO: 8350) |
| KRAS-459 Target: | 5′-TTCACCATTATAGAGAACAAA-3′ |
| | (SEQ ID NO: 8351) |
| KRAS-460 Target: | 5′-TCACCATTATAGAGAACAAAT-3′ |
| | (SEQ ID NO: 8352) |
| KRAS-461 Target: | 5′-CACCATTATAGAGAACAAATT-3′ |
| | (SEQ ID NO: 8353) |
| KRAS-462 Target: | 5′-ACCATTATAGAGAACAAATTA-3′ |
| | (SEQ ID NO: 8354) |
| KRAS-508 Target: | 5′-ACCTATGGTCCTAGTAGGAAA-3′ |
| | (SEQ ID NO: 8355) |
| KRAS-531 Target: | 5′-AATGTGATTTGCCTTCTAGAA-3′ |
| | (SEQ ID NO: 8356) |
| KRAS-532 Target: | 5′-ATGTGATTTGCCTTCTAGAAC-3′ |
| | (SEQ ID NO: 8357) |
| KRAS-534 Target: | 5′-GTGATTTGCCTTCTAGAACAG-3′ |
| | (SEQ ID NO: 8358) |
| KRAS-586 Target: | 5′-AAGTTATGGAATTCCTTTTAT-3′ |
| | (SEQ ID NO: 8359) |
| KRAS-587 Target: | 5′-AGTTATGGAATTCCTTTTATT-3′ |
| | (SEQ ID NO: 8360) |
| KRAS-588 Target: | 5′-GTTATGGAATTCCTTTTATTG-3′ |
| | (SEQ ID NO: 8361) |
| KRAS-763 Target: | 5′-ATGATGCCTTCTATACATTAG-3′ |
| | (SEQ ID NO: 8362) |
| KRAS-764 Target: | 5′-TGATGCCTTCTATACATTAGT-3′ |
| | (SEQ ID NO: 8363) |
| KRAS-784 Target: | 5′-TTCGAGAAATTCGAAAACATA-3′ |
| | (SEQ ID NO: 8364) |
| KRAS-794 Target: | 5′-TCGAAAACATAAAGAAAAGAT-3′ |
| | (SEQ ID NO: 8365) |
| KRAS-795 Target: | 5′-CGAAAACATAAAGAAAAGATG-3′ |
| | (SEQ ID NO: 8366) |
| KRAS-796 Target: | 5′-GAAAACATAAAGAAAAGATGA-3′ |
| | (SEQ ID NO: 8367) |
| KRAS-797 Target: | 5′-AAAACATAAAGAAAAGATGAG-3′ |
| | (SEQ ID NO: 8368) |
| KRAS-798 Target: | 5′-AAACATAAAGAAAAGATGAGC-3′ |
| | (SEQ ID NO: 8369) |
| KRAS-799 Target: | 5′-AACATAAAGAAAAGATGAGCA-3′ |
| | (SEQ ID NO: 8370) |
| KRAS-800 Target: | 5′-ACATAAAGAAAAGATGAGCAA-3′ |
| | (SEQ ID NO: 8371) |
| KRAS-801 Target: | 5′-CATAAAGAAAAGATGAGCAAA-3′ |
| | (SEQ ID NO: 8372) |
| KRAS-802 Target: | 5′-ATAAAGAAAAGATGAGCAAAG-3′ |
| | (SEQ ID NO: 8373) |
| KRAS-908 Target: | 5′-ACAAGTGGTAATTTTTGTACA-3′ |
| | (SEQ ID NO: 8374) |
| KRAS-909 Target: | 5′-CAAGTGGTAATTTTTGTACAT-3′ |
| | (SEQ ID NO: 8375) |
| KRAS-920 Target: | 5′-TTTTGTACATTACACTAAATT-3′ |
| | (SEQ ID NO: 8376) |
| KRAS-921 Target: | 5′-TTTGTACATTACACTAAATTA-3′ |
| | (SEQ ID NO: 8377) |
| KRAS-922 Target: | 5′-TTGTACATTACACTAAATTAT-3′ |
| | (SEQ ID NO: 8378) |
| KRAS-923 Target: | 5′-TGTACATTACACTAAATTATT-3′ |
| | (SEQ ID NO: 8379) |
| KRAS-924 Target: | 5′-GTACATTACACTAAATTATTA-3′ |
| | (SEQ ID NO: 8380) |
| KRAS-925 Target: | 5′-TACATTACACTAAATTATTAG-3′ |
| | (SEQ ID NO: 8381) |
| KRAS-926 Target: | 5′-ACATTACACTAAATTATTAGC-3′ |
| | (SEQ ID NO: 8382) |
| KRAS-927 Target: | 5′-CATTACACTAAATTATTAGCA-3′ |
| | (SEQ ID NO: 8383) |
| KRAS-928 Target: | 5′-ATTACACTAAATTATTAGCAT-3′ |
| | (SEQ ID NO: 8384) |
| KRAS-938 Target: | 5′-ATTATTAGCATTTGTTTTAGC-3′ |
| | (SEQ ID NO: 8385) |
| KRAS-939 Target: | 5′-TTATTAGCATTTGTTTTAGCA-3′ |
| | (SEQ ID NO: 8386) |
| KRAS-940 Target: | 5′-TATTAGCATTTGTTTTAGCAT-3′ |
| | (SEQ ID NO: 8387) |
| KRAS-941 Target: | 5′-ATTAGCATTTGTTTTAGCATT-3′ |
| | (SEQ ID NO: 8388) |
| KRAS-942 Target: | 5′-TTAGCATTTGTTTTAGCATTA-3′ |
| | (SEQ ID NO: 8389) |
| KRAS-943 Target: | 5′-TAGCATTTGTTTTAGCATTAC-3′ |
| | (SEQ ID NO: 8390) |
| KRAS-944 Target: | 5′-AGCATTTGTTTTAGCATTACC-3′ |
| | (SEQ ID NO: 8391) |
| KRAS-945 Target: | 5′-GCATTTGTTTTAGCATTACCT-3′ |
| | (SEQ ID NO: 8392) |
| KRAS-946 Target: | 5′-CATTTGTTTTAGCATTACCTA-3′ |
| | (SEQ ID NO: 8393) |
| KRAS-1010 Target: | 5′-TGCTTATTTTAAAATGACAGT-3′ |
| | (SEQ ID NO: 8394) |
| KRAS-1012 Target: | 5′-CTTATTTTAAAATGACAGTGG-3′ |
| | (SEQ ID NO: 8395) |
| KRAS-1045 Target: | 5′-CCTCTAAGTGCCAGTATTCCC-3′ |
| | (SEQ ID NO: 8396) |
| KRAS-1197 Target: | 5′-AACAAATTAATGAAGCTTTTG-3′ |
| | (SEQ ID NO: 8397) |
| KRAS-1198 Target: | 5′-ACAAATTAATGAAGCTTTTGA-3′ |
| | (SEQ ID NO: 8398) |
| KRAS-1230 Target: | 5′-TCTGTGTTTTATCTAGTCACA-3′ |
| | (SEQ ID NO: 8399) |
| KRAS-1231 Target: | 5′-CTGTGTTTTATCTAGTCACAT-3′ |
| | (SEQ ID NO: 8400) |
| KRAS-1234 Target: | 5′-TGTTTTATCTAGTCACATAAA-3′ |
| | (SEQ ID NO: 8401) |
| KRAS-1249 Target: | 5′-CATAAATGGATTAATTACTAA-3′ |
| | (SEQ ID NO: 8402) |
| KRAS-1250 Target: | 5′-ATAAATGGATTAATTACTAAT-3′ |
| | (SEQ ID NO: 8403) |
| KRAS-1287 Target: | 5′-TAATTGGTTTTTACTGAAACA-3′ |
| | (SEQ ID NO: 8404) |
| KRAS-1527 Target: | 5′-GCCATTTCCTTTTCACATTAG-3′ |
| | (SEQ ID NO: 8405) |
| KRAS-1533 Target: | 5′-TCCTTTTCACATTAGATAAAT-3′ |
| | (SEQ ID NO: 8406) |
| KRAS-1540 Target: | 5′-CACATTAGATAAATTACTATA-3′ |
| | (SEQ ID NO: 8407) |
| KRAS-1541 Target: | 5′-ACATTAGATAAATTACTATAA-3′ |
| | (SEQ ID NO: 8408) |
| KRAS-1542 Target: | 5′-CATTAGATAAATTACTATAAA-3′ |
| | (SEQ ID NO: 8409) |
| KRAS-1583 Target: | 5′-GTTAAGGCAGACCCAGTATGA-3′ |
| | (SEQ ID NO: 8410) |
| KRAS-1584 Target: | 5′-TTAAGGCAGACCCAGTATGAA-3′ |
| | (SEQ ID NO: 8411) |
| KRAS-1585 Target: | 5′-TAAGGCAGACCCAGTATGAAA-3′ |
| | (SEQ ID NO: 8412) |
| KRAS-1586 Target: | 5′-AAGGCAGACCCAGTATGAAAT-3′ |
| | (SEQ ID NO: 8413) |
| KRAS-1597 Target: | 5′-AGTATGAAATGGGGATTATTA-3′ |
| | (SEQ ID NO: 8414) |
| KRAS-1606 Target: | 5′-TGGGGATTATTATAGCAACCA-3′ |
| | (SEQ ID NO: 8415) |
| KRAS-1630 Target: | 5′-TGGGGCTATATTTACATGCTA-3′ |
| | (SEQ ID NO: 8416) |
| KRAS-1631 Target: | 5′-GGGGCTATATTTACATGCTAC-3′ |
| | (SEQ ID NO: 8417) |
| KRAS-1632 Target: | 5′-GGGCTATATTTACATGCTACT-3′ |
| | (SEQ ID NO: 8418) |
| KRAS-1633 Target: | 5′-GGCTATATTTACATGCTACTA-3′ |
| | (SEQ ID NO: 8419) |
| KRAS-1634 Target: | 5′-GCTATATTTACATGCTACTAA-3′ |
| | (SEQ ID NO: 8420) |
| KRAS-1635 Target: | 5′-CTATATTTACATGCTACTAAA-3′ |
| | (SEQ ID NO: 8421) |
| KRAS-1636 Target: | 5′-TATATTTACATGCTACTAAAT-3′ |
| | (SEQ ID NO: 8422) |
| KRAS-1637 Target: | 5′-ATATTTACATGCTACTAAATT-3′ |
| | (SEQ ID NO: 8423) |
| KRAS-1638 Target: | 5′-TATTTACATGCTACTAAATTT-3′ |
| | (SEQ ID NO: 8424) |
| KRAS-1639 Target: | 5′-ATTTACATGCTACTAAATTTT-3′ |
| | (SEQ ID NO: 8425) |
| KRAS-1640 Target: | 5′-TTTACATGCTACTAAATTTTT-3′ |
| | (SEQ ID NO: 8426) |
| KRAS-1736 Target: | 5′-CTCTTTCATAGTATAACTTTA-3′ |
| | (SEQ ID NO: 8427) |
| KRAS-1741 Target: | 5′-TCATAGTATAACTTTAAATCT-3′ |
| | (SEQ ID NO: 8428) |
| KRAS-1742 Target: | 5 *-CATAGTATAACTTTAAATCTT-3′ |
| | (SEQ ID NO: 8429) |
| KRAS-1753 Target: | 5′-TTTAAATCTTTTCTTCAACTT-3′ |
| | (SEQ ID NO: 8430) |
| KRAS-1754 Target: | 5′-TTAAATCTTTTCTTCAACTTG-3′ |
| | (SEQ ID NO: 8431) |
| KRAS-1769 Target: | 5′-AACTTGAGTCTTTGAAGATAG-3′ |
| | (SEQ ID NO: 8432) |
| KRAS-1771 Target: | 5′-CTTGAGTCTTTGAAGATAGTT-3′ |
| | (SEQ ID NO: 8433) |
| KRAS-1772 Target: | 5′-TTGAGTCTTTGAAGATAGTTT-3′ |
| | (SEQ ID NO: 8434) |
| KRAS-1783 Target: | 5′-AAGATAGTTTTAATTCTGCTT-3′ |
| | (SEQ ID NO: 8435) |
| KRAS-1784 Target: | 5′-AGATAGTTTTAATTCTGCTTG-3′ |
| | (SEQ ID NO: 8436) |
| KRAS-1785 Target: | 5′-GATAGTTTTAATTCTGCTTGT-3′ |
| | (SEQ ID NO: 8437) |
| KRAS-1799 Target: | 5′-TGCTTGTGACATTAAAAGATT-3′ |
| | (SEQ ID NO: 8438) |
| KRAS-2100 Target: | 5′-AATATTAACTCAAAAGTTGAG-3′ |
| | (SEQ ID NO: 8439) |
| KRAS-2134 Target: | 5′-GGTGTGCCAAGACATTAATTT-3′ |
| | (SEQ ID NO: 8440) |
| KRAS-2216 Target: | 5′-ACTGGTTAAATTAACATTGCA-3′ |
| | (SEQ ID NO: 8441) |
| KRAS-2217 Target: | 5′-CTGGTTAAATTAACATTGCAT-3′ |
| | (SEQ ID NO: 8442) |
| KRAS-2218 Target: | 5′-TGGTTAAATTAACATTGCATA-3′ |
| | (SEQ ID NO: 8443) |
| KRAS-2229 Target: | 5′-ACATTGCATAAACACTTTTCA-3′ |
| | (SEQ ID NO: 8444) |
| KRAS-2247 Target: | 5′-TCAAGTCTGATCCATATTTAA-3′ |
| | (SEQ ID NO: 8445) |
| KRAS-2326 Target: | 5′-TTTAAAATAAATGAAGTGAGA-3′ |
| | (SEQ ID NO: 8446) |
| KRAS-2327 Target: | 5′-TTAAAATAAATGAAGTGAGAT-3′ |
| | (SEQ ID NO: 8447) |
| KRAS-2547 Target: | 5′-TCAAGCTCAGCACAATCTGTA-3′ |
| | (SEQ ID NO: 8448) |
| KRAS-2548 Target: | 5′-CAAGCTCAGCACAATCTGTAA-3′ |
| | (SEQ ID NO: 8449) |
| KRAS-3741 Target: | 5′-GCATAACTGTGATTCTTTTAG-3′ |
| | (SEQ ID NO: 8450) |
| KRAS-3746 Target: | 5′-ACTGTGATTCTTTTAGGACAA-3′ |
| | (SEQ ID NO: 8451) |
| KRAS-3747 Target: | 5′-CTGTGATTCTTTTAGGACAAT-3′ |
| | (SEQ ID NO: 8452) |
| KRAS-3783 Target: | 5′-GGTGTATGTCAGATATTCATA-3′ |
| | (SEQ ID NO: 8453) |
| KRAS-3784 Target: | 5′-GTGTATGTCAGATATTCATAT-3′ |
| | (SEQ ID NO: 8454) |
| KRAS-3810 Target: | 5′-CAAATGTGTAATATTCCAGTT-3′ |
| | (SEQ ID NO: 8455) |
| KRAS-4396 Target: | 5′-CACACTGCATAGGAATTTAGA-3′ |
| | (SEQ ID NO: 8456) |
| KRAS-4447 Target: | 5′-GTCACCATTGCACAATTTTGT-3′ |
| | (SEQ ID NO: 8457) |
| KRAS-4448 Target: | 5′-TCACCATTGCACAATTTTGTC-3′ |
| | (SEQ ID NO: 8458) |
| KRAS-4449 Target: | 5′-CACCATTGCACAATTTTGTCC-3′ |
| | (SEQ ID NO: 8459) |
| KRAS-4450 Target: | 5′-ACCATTGCACAATTTTGTCCT-3′ |
| | (SEQ ID NO: 8460) |
| KRAS-4451 Target: | 5′-CCATTGCACAATTTTGTCCTA-3′ |
| | (SEQ ID NO: 8461) |
| KRAS-4452 Target: | 5′-CATTGCACAATTTTGTCCTAA-3′ |
| | (SEQ ID NO: 8462) |
| KRAS-4748 Target: | 5′-GATAGCATGAATTCTGCATTG-3′ |
| | (SEQ ID NO: 8463) |
| KRAS-4749 Target: | 5′-ATAGCATGAATTCTGCATTGA-3′ |
| | (SEQ ID NO: 8464) |
| KRAS-4878 Target: | 5′-AGTTTGAAGTGCCTGTTTGGG-3′ |
| | (SEQ ID NO: 8465) |
| KRAS-4879 Target: | 5′-GTTTGAAGTGCCTGTTTGGGA-3′ |
| | (SEQ ID NO: 8466) |
| KRAS-4880 Target: | 5′-TTTGAAGTGCCTGTTTGGGAT-3′ |
| | (SEQ ID NO: 8467) |
| KRAS-5073 Target: | 5′-CCTTTGAGTGCCAATTTCTTA-3′ |
| | (SEQ ID NO: 8468) |
| KRAS-5074 Target: | 5′-CTTTGAGTGCCAATTTCTTAC-3′ |
| | (SEQ ID NO: 8469) |
| KRAS-5075 Target: | 5′-TTTGAGTGCCAATTTCTTACT-3′ |
| | (SEQ ID NO: 8470) |
| KRAS-5076 Target: | 5′-TTGAGTGCCAATTTCTTACTA-3′ |
| | (SEQ ID NO: 8471) |
| KRAS-5077 Target: | 5′-TGAGTGCCAATTTCTTACTAG-3′ |
| | (SEQ ID NO: 8472) |
| KRAS-5078 Target: | 5′-GAGTGCCAATTTCTTACTAGT-3′ |
| | (SEQ ID NO: 8473) |
| KRAS-5128 Target: | 5′-GAATGTATTTTAACTATTTTT-3′ |
| | (SEQ ID NO: 8474) |
| KRAS-5129 Target: | 5′-AATGTATTTTAACTATTTTTG-3′ |
| | (SEQ ID NO: 8475) |
| KRAS-5138 Target: | 5′-TAACTATTTTTGTATAGTGTA-3′ |
| | (SEQ ID NO: 8476) |
| KRAS-5139 Target: | 5′-AACTATTTTTGTATAGTGTAA-3′ |
| | (SEQ ID NO: 8477) |
| KRAS-5140 Target: | 5′-ACTATTTTTGTATAGTGTAAA-3′ |
| | (SEQ ID NO: 8478) |
| KRAS-5141 Target: | 5′-CTATTTTTGTATAGTGTAAAC-3′ |
| | (SEQ ID NO: 8479) |
| KRAS-5142 Target: | 5′-TATTTTTGTATAGTGTAAACT-3′ |
| | (SEQ ID NO: 8480) |
| KRAS-5143 Target: | 5′-ATTTTTGTATAGTGTAAACTG-3′ |
| | (SEQ ID NO: 8481) |
| KRAS-5163 Target: | 5′-GAAACATGCACATTTTGTACA-3′ |
| | (SEQ ID NO: 8482) |
| KRAS-5164 Target: | 5′-AAACATGCACATTTTGTACAT-3′ |
| | (SEQ ID NO: 8483) |
| KRAS-5167 Target: | 5′-CATGCACATTTTGTACATTGT-3′ |
| | (SEQ ID NO: 8484) |
| KRAS-5168 Target: | 5′-ATGCACATTTTGTACATTGTG-3′ |
| | (SEQ ID NO: 8485) |
| KRAS-5169 Target: | 5′-TGCACATTTTGTACATTGTGC-3′ |
| | (SEQ ID NO: 8486) |
| KRAS-5170 Target: | 5′-GCACATTTTGTACATTGTGCT-3′ |
| | (SEQ ID NO: 8487) |
| KRAS-5171 Target: | 5′-CACATTTTGTACATTGTGCTT-3′ |
| | (SEQ ID NO: 8488) |
| KRAS-5172 Target: | 5′-ACATTTTGTACATTGTGCTTT-3′ |
| | (SEQ ID NO: 8489) |
| KRAS-5173 Target: | 5′-CATTTTGTACATTGTGCTTTC-3′ |
| | (SEQ ID NO: 8490) |
| KRAS-5197 Target: | 5′-TGTGGGACATATGCAGTGTGA-3′ |
| | (SEQ ID NO: 8491) |
| KRAS-5198 Target: | 5′-GTGGGACATATGCAGTGTGAT-3′ |
| | (SEQ ID NO: 8492) |
| KRAS-5199 Target: | 5′-TGGGACATATGCAGTGTGATC-3′ |
| | (SEQ ID NO: 8493) |
| KRAS-5200 Target: | 5′-GGGACATATGCAGTGTGATCC-3′ |
| | (SEQ ID NO: 8494) |
| KRAS-5201 Target: | 5′-GGACATATGCAGTGTGATCCA-3′ |
| | (SEQ ID NO: 8495) |
| KRAS-5202 Target: | 5′-GACATATGCAGTGTGATCCAG-3′ |
| | (SEQ ID NO: 8496) |
| KRAS-5203 Target: | 5′-ACATATGCAGTGTGATCCAGT-3′ |
| | (SEQ ID NO: 8497) |
| KRAS-5204 Target: | 5′-CATATGCAGTGTGATCCAGTT-3′ |
| | (SEQ ID NO: 8498) |
| KRAS-5205 Target: | 5′-ATATGCAGTGTGATCCAGTTG-3′ |
| | (SEQ ID NO: 8499) |
| KRAS-5209 Target: | 5′-GCAGTGTGATCCAGTTGTTTT-3′ |
| | (SEQ ID NO: 8500) |
| KRAS-5210 Target: | 5′-CAGTGTGATCCAGTTGTTTTC-3′ |
| | (SEQ ID NO: 8501) |
| KRAS-5211 Target: | 5′-AGTGTGATCCAGTTGTTTTCC-3′ |
| | (SEQ ID NO: 8502) |
| KRAS-5212 Target: | 5′-GTGTGATCCAGTTGTTTTCCA-3′ |
| | (SEQ ID NO: 8503) |
| KRAS-5213 Target: | 5′-TGTGATCCAGTTGTTTTCCAT-3′ |
| | (SEQ ID NO: 8504) |
| KRAS-5214 Target: | 5′-GTGATCCAGTTGTTTTCCATC-3′ |
| | (SEQ ID NO: 8505) |
| KRAS-5234 Target: | 5′-CATTTGGTTGCGCTGACCTAG-3′ |
| | (SEQ ID NO: 8506) |
| KRAS-5235 Target: | 5′-ATTTGGTTGCGCTGACCTAGG-3′ |
| | (SEQ ID NO: 8507) |
| KRAS-5252 Target: | 5′-TAGGAATGTTGGTCATATCAA-3′ |
| | (SEQ ID NO: 8508) |
| KRAS-5253 Target: | 5′-AGGAATGTTGGTCATATCAAA-3′ |
| | (SEQ ID NO: 8509) |
| KRAS-5254 Target: | 5′-GGAATGTTGGTCATATCAAAC-3′ |
| | (SEQ ID NO: 8510) |
| KRAS-5255 Target: | 5′-GAATGTTGGTCATATCAAACA-3′ |
| | (SEQ ID NO: 8511) |
| KRAS-5256 Target: | 5′-AATGTTGGTCATATCAAACAT-3′ |
| | (SEQ ID NO: 8512) |
| KRAS-5257 Target: | 5′-ATGTTGGTCATATCAAACATT-3′ |
| | (SEQ ID NO: 8513) |
| KRAS-5258 Target: | 5′-TGTTGGTCATATCAAACATTA-3′ |
| | (SEQ ID NO: 8514) |
| KRAS-5259 Target: | 5′-GTTGGTCATATCAAACATTAA-3′ |
| | (SEQ ID NO: 8515) |
| KRAS-5260 Target: | 5′-TTGGTCATATCAAACATTAAA-3′ |
| | (SEQ ID NO: 8516) |
| KRAS-5299 Target: | 5′-TGAAATTAACTTTTAAATGTT-3′ |
| | (SEQ ID NO: 8517) |
| KRAS-5300 Target: | 5′-GAAATTAACTTTTAAATGTTT-3′ |
| | (SEQ ID NO: 8518) |
| KRAS-5304 Target: | 5′-TTAACTTTTAAATGTTTATAG-3′ |
| | (SEQ ID NO: 8519) |
| KRAS-5305 Target: | 5′-TAACTTTTAAATGTTTATAGG-3′ |
| | (SEQ ID NO: 8520) |
| KRAS-5306 Target: | 5′-AACTTTTAAATGTTTATAGGA-3′ |
| | (SEQ ID NO: 8521) |
| KRAS-5307 Target: | 5′-ACTTTTAAATGTTTATAGGAG-3′ |
| | (SEQ ID NO: 8522) |
| KRAS-5308 Target: | 5′-CTTTTAAATGTTTATAGGAGT-3′ |
| | (SEQ ID NO: 8523) |
| KRAS-5309 Target: | 5′-TTTTAAATGTTTATAGGAGTA-3′ |
| | (SEQ ID NO: 8524) |
| KRAS-5347 Target: | 5′-TAAAATTTGTAATATTTTTGT-3′ |
| | (SEQ ID NO: 8525) |
| KRAS-5348 Target: | 5′-AAAATTTGTAATATTTTTGTC-3′ |
| | (SEQ ID NO: 8526) |
| KRAS-5349 Target: | 5′-AAATTTGTAATATTTTTGTCA-3′ |
| | (SEQ ID NO: 8527) |
| KRAS-5350 Target: | 5′-AATTTGTAATATTTTTGTCAT-3′ |
| | (SEQ ID NO: 8528) |
| KRAS-5351 Target: | 5′-ATTTGTAATATTTTTGTCATG-3′ |
| | (SEQ ID NO: 8529) |
| KRAS-5352 Target: | 5′-TTTGTAATATTTTTGTCATGA-3′ |
| | (SEQ ID NO: 8530) |
| KRAS-5353 Target: | 5′-TTGTAATATTTTTGTCATGAA-3′ |
| | (SEQ ID NO: 8531) |
| KRAS-5354 Target: | 5′-TGTAATATTTTTGTCATGAAC-3′ |
| | (SEQ ID NO: 8532) |
| KRAS-5389 Target: | 5′-TTATTGTAATGTAATAAAAAT-3′ |
| | (SEQ ID NO: 8533) |
| KRAS-5390 Target: | 5′-TATTGTAATGTAATAAAAATA-3′ |
| | (SEQ ID NO: 8534) |
| KRAS-5391 Target: | 5′-ATTGTAATGTAATAAAAATAG-3′ |
| | (SEQ ID NO: 8535) |
| KRAS-5392 Target: | 5′-TTGTAATGTAATAAAAATAGT-3′ |
| | (SEQ ID NO: 8536) |
| KRAS-5393 Target: | 5′-TGTAATGTAATAAAAATAGTT-3′ |
| | (SEQ ID NO: 8537) |

[0182] Within Tables 2-7 above, underlined residues indicate 2′-O-methyl residues, UPPER CASE indicates ribonucleotides, lower case denotes deoxyribonucleotides, and in Table 2, “P-” indicates a 5′-terminal phosphate group. The above DsiRNA agents of Tables 3-6 are 25/27mer agents possessing a blunt end. The structures and/or modification patterning of the agents of Tables 3-6 can be readily adapted to the above generic sequence structures, e.g., the 3′ overhang of the second strand can be extended or contracted, 2′-O-methylation of the second strand can be expanded towards the 5′ end of the second strand, optionally at alternating sites, etc. Such further modifications are optional, as 25/27mer DsiRNAs with such modifications can also be readily designed from the above DsiRNA agents and are also expected to be functional inhibitors of KRAS expression.

[0183] In certain embodiments, the DsiRNA agents of the invention require, e.g., at least 19, at least 20, at least 21, at least 22, at least 23, at least 24, at least 25 or at least 26 residues of the first strand to be complementary to corresponding residues of the second strand. In certain related embodiments, these first strand residues complementary to corresponding residues of the second strand are optionally consecutive residues.

[0184] As used herein “DsiRNAmm” refers to a DisRNA having a “mismatch tolerant region” containing one, two, three or four mismatched base pairs of the duplex formed by the sense and antisense strands of the DsiRNA, where such mismatches are positioned within the DsiRNA at a location(s) lying between (and thus not including) the two terminal base pairs of either end of the DsiRNA. The mismatched base pairs are located within a “mismatch-tolerant region” which is defined herein with respect to the location of the projected Ago2 cut site of the corresponding target nucleic acid. The mismatch tolerant region is located “upstream of” the projected Ago2 cut site of the target strand. “Upstream” in this context will be understood as the 5′-most portion of the DsiRNAmm duplex, where 5′ refers to the orientation of the sense strand of the DsiRNA duplex. Therefore, the mismatch tolerant region is upstream of the base on the sense (passenger) strand that corresponds to the projected Ago2 cut site of the target nucleic acid (see FIG. 1); alternatively, when referring to the antisense (guide) strand of the DsiRNAmm, the mismatch tolerant region can also be described as positioned downstream of the base that is complementary to the projected Ago2 cut site of the target nucleic acid, that is, the 3′-most portion of the antisense strand of the DsiRNAmm (where position 1 of the antisense strand is the 5′ terminal nucleotide of the antisense strand, see FIG. 1).

[0185] In one embodiment, for example with numbering as depicted in FIG. 1, the mismatch tolerant region is positioned between and including base pairs 3-9 when numbered from the nucleotide starting at the 5′ end of the sense strand of the duplex. Therefore, a DsiRNAmm of the invention possesses a single mismatched base pair at any one of positions 3, 4, 5, 6, 7, 8 or 9 of the sense strand of a right-hand extended DsiRNA (where position 1 is the 5′ terminal nucleotide of the sense strand and position 9 is the nucleotide residue of the sense strand that is immediately 5′ of the projected Ago2 cut site of the target KRAS RNA sequence corresponding to the sense strand sequence). In certain embodiments, for a DsiRNAmm that possesses a mismatched base pair nucleotide at any of positions 3, 4, 5, 6, 7, 8 or 9 of the sense strand, the corresponding mismatched base pair nucleotide of the antisense strand not only forms a mismatched base pair with the DsiRNAmm sense strand sequence, but also forms a mismatched base pair with a DsiRNAmm target KRAS RNA sequence (thus, complementarity between the antisense strand sequence and the sense strand sequence is disrupted at the mismatched base pair within the DsiRNAmm, and complementarity is similarly disrupted between the antisense strand sequence of the DsiRNAmm and the target KRAS RNA sequence). In alternative embodiments, the mismatch base pair nucleotide of the antisense strand of a DsiRNAmm only form a mismatched base pair with a corresponding nucleotide of the sense strand sequence of the DsiRNAmm, yet base pairs with its corresponding target KRAS RNA sequence nucleotide (thus, complementarity between the antisense strand sequence and the sense strand sequence is disrupted at the mismatched base pair within the DsiRNAmm, yet complementarity is maintained between the antisense strand sequence of the DsiRNAmm and the target KRAS RNA sequence).

[0186] A DsiRNAmm of the invention that possesses a single mismatched base pair within the mismatch-tolerant region (mismatch region) as described above (e.g., a DsiRNAmm harboring a mismatched nucleotide residue at any one of positions 3, 4, 5, 6, 7, 8 or 9 of the sense strand) can further include one, two or even three additional mismatched base pairs. In preferred embodiments, these one, two or three additional mismatched base pairs of the DsiRNAmm occur at position(s) 3, 4, 5, 6, 7, 8 and/or 9 of the sense strand (and at corresponding residues of the antisense strand). In one embodiment where one additional mismatched base pair is present within a DsiRNAmm, the two mismatched base pairs of the sense strand can occur, e.g., at nucleotides of both position 4 and position 6 of the sense strand (with mismatch also occurring at corresponding nucleotide residues of the antisense strand).

[0187] In DsiRNAmm agents possessing two mismatched base pairs, mismatches can occur consecutively (e.g., at consecutive positions along the sense strand nucleotide sequence). Alternatively, nucleotides of the sense strand that form mismatched base pairs with the antisense strand sequence can be interspersed by nucleotides that base pair with the antisense strand sequence (e.g., for a DsiRNAmm possessing mismatched nucleotides at positions 3 and 6, but not at positions 4 and 5, the mismatched residues of sense strand positions 3 and 6 are interspersed by two nucleotides that form matched base pairs with corresponding residues of the antisense strand). For example, two residues of the sense strand (located within the mismatch-tolerant region of the sense strand) that form mismatched base pairs with the corresponding antisense strand sequence can occur with zero, one, two, three, four or five matched base pairs located between these mismatched base pairs.

[0188] For certain DsiRNAmm agents possessing three mismatched base pairs, mismatches can occur consecutively (e.g., in a triplet along the sense strand nucleotide sequence). Alternatively, nucleotides of the sense strand that form mismatched base pairs with the antisense strand sequence can be interspersed by nucleotides that form matched base pairs with the antisense strand sequence (e.g., for a DsiRNAmm possessing mismatched nucleotides at positions 3, 4 and 8, but not at positions 5, 6 and 7, the mismatched residues of sense strand positions 3 and 4 are adjacent to one another, while the mismatched residues of sense strand positions 4 and 8 are interspersed by three nucleotides that form matched base pairs with corresponding residues of the antisense strand). For example, three residues of the sense strand (located within the mismatch-tolerant region of the sense strand) that form mismatched base pairs with the corresponding antisense strand sequence can occur with zero, one, two, three or four matched base pairs located between any two of these mismatched base pairs.

[0189] For certain DsiRNAmm agents possessing four mismatched base pairs, mismatches can occur consecutively (e.g., in a quadruplet along the sense strand nucleotide sequence). Alternatively, nucleotides of the sense strand that form mismatched base pairs with the antisense strand sequence can be interspersed by nucleotides that form matched base pairs with the antisense strand sequence (e.g., for a DsiRNAmm possessing mismatched nucleotides at positions 3, 5, 7 and 8, but not at positions 4 and 6, the mismatched residues of sense strand positions 7 and 8 are adjacent to one another, while the mismatched residues of sense strand positions 3 and 5 are interspersed by one nucleotide that forms a matched base pair with the corresponding residue of the antisense strand—similarly, the mismatched residues of sense strand positions 5 and 7 are also interspersed by one nucleotide that forms a matched base pair with the corresponding residue of the antisense strand). For example, four residues of the sense strand (located within the mismatch-tolerant region of the sense strand) that form mismatched base pairs with the corresponding antisense strand sequence can occur with zero, one, two or three matched base pairs located between any two of these mismatched base pairs.

[0190] In another embodiment, for example with numbering also as depicted in FIG. 1, a DsiRNAmm of the invention comprises a mismatch tolerant region which possesses a single mismatched base pair nucleotide at any one of positions 17, 18, 19, 20, 21, 22 or 23 of the antisense strand of the DsiRNA (where position 1 is the 5′ terminal nucleotide of the antisense strand and position 17 is the nucleotide residue of the antisense strand that is immediately 3′ (downstream) in the antisense strand of the projected Ago2 cut site of the target KRAS RNA sequence sufficiently complementary to the antisense strand sequence). In certain embodiments, for a DsiRNAmm that possesses a mismatched base pair nucleotide at any of positions 17, 18, 19, 20, 21, 22 or 23 of the antisense strand with respect to the sense strand of the DsiRNAmm, the mismatched base pair nucleotide of the antisense strand not only forms a mismatched base pair with the DsiRNAmm sense strand sequence, but also forms a mismatched base pair with a DsiRNAmm target KRAS RNA sequence (thus, complementarity between the antisense strand sequence and the sense strand sequence is disrupted at the mismatched base pair within the DsiRNAmm, and complementarity is similarly disrupted between the antisense strand sequence of the DsiRNAmm and the target KRAS RNA sequence). In alternative embodiments, the mismatch base pair nucleotide of the antisense strand of a DsiRNAmm only forms a mismatched base pair with a corresponding nucleotide of the sense strand sequence of the DsiRNAmm, yet base pairs with its corresponding target KRAS RNA sequence nucleotide (thus, complementarity between the antisense strand sequence and the sense strand sequence is disrupted at the mismatched base pair within the DsiRNAmm, yet complementarity is maintained between the antisense strand sequence of the DsiRNAmm and the target KRAS RNA sequence).

[0191] A DsiRNAmm of the invention that possesses a single mismatched base pair within the mismatch-tolerant region as described above (e.g., a DsiRNAmm harboring a mismatched nucleotide residue at positions 17, 18, 19, 20, 21, 22 or 23 of the antisense strand) can further include one, two or even three additional mismatched base pairs. In preferred embodiments, these one, two or three additional mismatched base pairs of the DsiRNAmm occur at position(s) 17, 18, 19, 20, 21, 22 and/or 23 of the antisense strand (and at corresponding residues of the sense strand). In one embodiment where one additional mismatched base pair is present within a DsiRNAmm, the two mismatched base pairs of the antisense strand can occur, e.g., at nucleotides of both position 18 and position 20 of the antisense strand (with mismatch also occurring at corresponding nucleotide residues of the sense strand).

[0192] In DsiRNAmm agents possessing two mismatched base pairs, mismatches can occur consecutively (e.g., at consecutive positions along the antisense strand nucleotide sequence). Alternatively, nucleotides of the antisense strand that form mismatched base pairs with the sense strand sequence can be interspersed by nucleotides that base pair with the sense strand sequence (e.g., for a DsiRNAmm possessing mismatched nucleotides at positions 17 and 20, but not at positions 18 and 19, the mismatched residues of antisense strand positions 17 and 20 are interspersed by two nucleotides that form matched base pairs with corresponding residues of the sense strand). For example, two residues of the antisense strand (located within the mismatch-tolerant region of the sense strand) that form mismatched base pairs with the corresponding sense strand sequence can occur with zero, one, two, three, four, five, six or seven matched base pairs located between these mismatched base pairs.

[0193] For certain DsiRNAmm agents possessing three mismatched base pairs, mismatches can occur consecutively (e.g., in a triplet along the antisense strand nucleotide sequence). Alternatively, nucleotides of the antisense strand that form mismatched base pairs with the sense strand sequence can be interspersed by nucleotides that form matched base pairs with the sense strand sequence (e.g., for a DsiRNAmm possessing mismatched nucleotides at positions 17, 18 and 22, but not at positions 19, 20 and 21, the mismatched residues of antisense strand positions 17 and 18 are adjacent to one another, while the mismatched residues of antisense strand positions 18 and 122 are interspersed by three nucleotides that form matched base pairs with corresponding residues of the sense strand). For example, three residues of the antisense strand (located within the mismatch-tolerant region of the antisense strand) that form mismatched base pairs with the corresponding sense strand sequence can occur with zero, one, two, three, four, five or six matched base pairs located between any two of these mismatched base pairs.

[0194] For certain DsiRNAmm agents possessing four mismatched base pairs, mismatches can occur consecutively (e.g., in a quadruplet along the antisense strand nucleotide sequence). Alternatively, nucleotides of the antisense strand that form mismatched base pairs with the sense strand sequence can be interspersed by nucleotides that form matched base pairs with the sense strand sequence (e.g., for a DsiRNAmm possessing mismatched nucleotides at positions 18, 20, 22 and 23, but not at positions 19 and 21, the mismatched residues of antisense strand positions 22 and 23 are adjacent to one another, while the mismatched residues of antisense strand positions 18 and 20 are interspersed by one nucleotide that forms a matched base pair with the corresponding residue of the sense strand—similarly, the mismatched residues of antisense strand positions 20 and 22 are also interspersed by one nucleotide that forms a matched base pair with the corresponding residue of the sense strand). For example, four residues of the antisense strand (located within the mismatch-tolerant region of the antisense strand) that form mismatched base pairs with the corresponding sense strand sequence can occur with zero, one, two, three, four or five matched base pairs located between any two of these mismatched base pairs.

[0195] For reasons of clarity, the location(s) of mismatched nucleotide residues within the above DsiRNAmm agents are numbered in reference to the 5′ terminal residue of either sense or antisense strands of the DsiRNAmm. The numbering of positions located within the mismatch-tolerant region (mismatch region) of the antisense strand can shift with variations in the proximity of the 5′ terminus of the sense or antisense strand to the projected Ago2 cleavage site. Thus, the location(s) of preferred mismatch sites within either antisense strand or sense strand can also be identified as the permissible proximity of such mismatches to the projected Ago2 cut site. Accordingly, in one preferred embodiment, the position of a mismatch nucleotide of the sense strand of a DsiRNAmm is the nucleotide residue of the sense strand that is located immediately 5′ (upstream) of the projected Ago2 cleavage site of the corresponding target KRAS RNA sequence. In other preferred embodiments, a mismatch nucleotide of the sense strand of a DsiRNAmm is positioned at the nucleotide residue of the sense strand that is located two nucleotides 5′ (upstream) of the projected Ago2 cleavage site, three nucleotides 5′ (upstream) of the projected Ago2 cleavage site, four nucleotides 5′ (upstream) of the projected Ago2 cleavage site, five nucleotides 5′ (upstream) of the projected Ago2 cleavage site, six nucleotides 5′ (upstream) of the projected Ago2 cleavage site, seven nucleotides 5′ (upstream) of the projected Ago2 cleavage site, eight nucleotides 5′ (upstream) of the projected Ago2 cleavage site, or nine nucleotides 5′ (upstream) of the projected Ago2 cleavage site.

[0196] Exemplary single mismatch-containing 25/27mer DsiRNAs (DsiRNAmm) include the following structures (such mismatch-containing structures may also be incorporated into other exemplary DsiRNA structures shown herein).

5′-pXX^{M}XXXXXXXXXXXXXXXXXXXXDD-3′
3′-XXXX_{M}XXXXXXXXXXXXXXXXXXXXXXp-5′
5′-pXXX^{M}XXXXXXXXXXXXXXXXXXXDD-3′
3′-XXXXX_{M}XXXXXXXXXXXXXXXXXXXXXp-5′
5′-pXXXX^{M}XXXXXXXXXXXXXXXXXXDD-3′
3′-XXXXXX_{M}XXXXXXXXXXXXXXXXXXXXp-5′
5′-pXXXXX^{M}XXXXXXXXXXXXXXXXXDD-3′
3′-XXXXXXX_{M}XXXXXXXXXXXXXXXXXXXp-5′
5′-pXXXXXX^{M}XXXXXXXXXXXXXXXXDD-3′
3′-XXXXXXXX_{M}XXXXXXXXXXXXXXXXXXp-5′
5′-pXXXXXXX^{M}XXXXXXXXXXXXXXXDD-3′
3′-XXXXXXXXX_{M}XXXXXXXXXXXXXXXXXp-5′
5′-pXXXXXXXX^{M}XXXXXXXXXXXXXXDD-3′
3′-XXXXXXXXXX_{M}XXXXXXXXXXXXXXXXp-5′

wherein “X”=RNA, “D”=DNA, “p”=a phosphate group, “M”=Nucleic acid residues (RNA, DNA or non-natural or modified nucleic acids) that do not base pair (hydrogen bond) with corresponding “M” residues of otherwise complementary strand when strands are annealed. Any of the residues of such agents can optionally be 2′-O-methyl RNA monomers—alternating positioning of 2′-O-methyl RNA monomers that commences from the 3′-terminal residue of the bottom (second) strand, as shown above, can also be used in the above DsiRNAmm agents. For the above mismatch structures, the top strand is the sense strand, and the bottom strand is the antisense strand.

[0197] In certain embodiments, a DsiRNA of the invention can contain mismatches that exist in reference to the target KRAS RNA sequence yet do not necessarily exist as mismatched base pairs within the two strands of the DsiRNA—thus, a DsiRNA can possess perfect complementarity between first and second strands of a DsiRNA, yet still possess mismatched residues in reference to a target KRAS RNA (which, in certain embodiments, may be advantageous in promoting efficacy and/or potency and/or duration of effect). In certain embodiments, where mismatches occur between antisense strand and target KRAS RNA sequence, the position of a mismatch is located within the antisense strand at a position(s) that corresponds to a sequence of the sense strand located 5′ of the projected Ago2 cut site of the target region—e.g., antisense strand residue(s) positioned within the antisense strand to the 3′ of the antisense residue which is complementary to the projected Ago2 cut site of the target sequence.

[0198] Exemplary 25/27mer DsiRNAs that harbor a single mismatched residue in reference to target sequences include the following preferred structures.

Target RNA Sequence:
5′-. . . XXAXXXXXXXXXXXXXXXX . . .-3′
DsiRNAmm Sense Strand:
5′-pXXBXXXXXXXXXXXXXXXXXXXXDD-3′
DsiRNAmm Antisense Strand:
3′-XXXXEXXXXXXXXXXXXXXXXXXXXXXp-5′
Target RNA Sequence:
5′-. . . XXXAXXXXXXXXXXXXXXX . . .-3′
DsiRNAmm Sense Strand:
5′-pXXXBXXXXXXXXXXXXXXXXXXXDD-3′
DsiRNAmm Antisense Strand:
3′-XXXXXEXXXXXXXXXXXXXXXXXXXXXp-5′
Target RNA Sequence:
5′-. . . XXXXAXXXXXXXXXXXXXX . . .-3′
DsiRNAmm Sense Strand:
5′-pXXXXBXXXXXXXXXXXXXXXXXXDD-3′
DsiRNAmm Antisense Strand:
3′-XXXXXXEXXXXXXXXXXXXXXXXXXXXp-5′
Target RNA Sequence:
5′-. . . XXXXXAXXXXXXXXXXXXX . . .-3′
DsiRNAmm Sense Strand:
5′-pXXXXXBXXXXXXXXXXXXXXXXXDD-3′
DsiRNAmm Antisense Strand:
3′-XXXXXXXEXXXXXXXXXXXXXXXXXXXp-5′
Target RNA Sequence:
5′-. . . XXXXXXAXXXXXXXXXXXX . . .-3′
DsiRNAmm Sense Strand:
5′-pXXXXXXBXXXXXXXXXXXXXXXXDD-3′
DsiRNAmm Antisense Strand:
3′-XXXXXXXXEXXXXXXXXXXXXXXXXXXp-5′
Target RNA Sequence:
5′-. . . XXXXXXXAXXXXXXXXXXX . . .-3′
DsiRNAmm Sense Strand:
5′-pXXXXXXXBXXXXXXXXXXXXXXXDD-3′
DsiRNAmm Antisense Strand:
3′-XXXXXXXXXEXXXXXXXXXXXXXXXXXp-5′
Target RNA Sequence:
5′-. . . XXXXXXXXAXXXXXXXXXX . . .-3′
DsiRNAmm Sense Strand:
5′-pXXXXXXXXBXXXXXXXXXXXXXXDD-3′
DsiRNAmm Antisense Strand:
3′-XXXXXXXXXXEXXXXXXXXXXXXXXXXp-5′

wherein “X”=RNA, “D”=DNA, “p”=a phosphate group, “E”=Nucleic acid residues (RNA, DNA or non-natural or modified nucleic acids) that do not base pair (hydrogen bond) with corresponding “A” RNA residues of otherwise complementary (target) strand when strands are annealed, yet optionally do base pair with corresponding “B” residues (“B” residues are also RNA, DNA or non-natural or modified nucleic acids). Any of the residues of such agents can optionally be 2′-O-methyl RNA monomers—alternating positioning of 2′-O-methyl RNA monomers that commences from the 3′-terminal residue of the bottom (second) strand, as shown above, can also be used in the above DsiRNA agents.

[0199] In addition to the above-exemplified structures, DsiRNAs of the invention can also possess one, two or three additional residues that form further mismatches with the target KRAS RNA sequence. Such mismatches can be consecutive, or can be interspersed by nucleotides that form matched base pairs with the target KRAS RNA sequence. Where interspersed by nucleotides that form matched base pairs, mismatched residues can be spaced apart from each other within a single strand at an interval of one, two, three, four, five, six, seven or even eight base paired nucleotides between such mismatch-forming residues.

[0200] As for the above-described DsiRNAmm agents, a preferred location within DsiRNAs for antisense strand nucleotides that form mismatched base pairs with target KRAS RNA sequence (yet may or may not form mismatches with corresponding sense strand nucleotides) is within the antisense strand region that is located 3′ (downstream) of the antisense strand sequence which is complementary to the projected Ago2 cut site of the DsiRNA (e.g., in FIG. 1, the region of the antisense strand which is 3′ of the projected Ago2 cut site is preferred for mismatch-forming residues and happens to be located at positions 17-23 of the antisense strand for the 25/27mer agent shown in FIG. 1). Thus, in one preferred embodiment, the position of a mismatch nucleotide (in relation to the target KRAS RNA sequence) of the antisense strand of a DsiRNAmm is the nucleotide residue of the antisense strand that is located immediately 3′ (downstream) within the antisense strand sequence of the projected Ago2 cleavage site of the corresponding target KRAS RNA sequence. In other preferred embodiments, a mismatch nucleotide of the antisense strand of a DsiRNAmm (in relation to the target KRAS RNA sequence) is positioned at the nucleotide residue of the antisense strand that is located two nucleotides 3′ (downstream) of the corresponding projected Ago2 cleavage site, three nucleotides 3′ (downstream) of the corresponding projected Ago2 cleavage site, four nucleotides 3′ (downstream) of the corresponding projected Ago2 cleavage site, five nucleotides 3′ (downstream) of the corresponding projected Ago2 cleavage site, six nucleotides 3′ (downstream) of the projected Ago2 cleavage site, seven nucleotides 3′ (downstream) of the projected Ago2 cleavage site, eight nucleotides 3′ (downstream) of the projected Ago2 cleavage site, or nine nucleotides 3′ (downstream) of the projected Ago2 cleavage site.

[0201] In DsiRNA agents possessing two mismatch-forming nucleotides of the antisense strand (where mismatch-forming nucleotides are mismatch forming in relation to target KRAS RNA sequence), mismatches can occur consecutively (e.g., at consecutive positions along the antisense strand nucleotide sequence). Alternatively, nucleotides of the antisense strand that form mismatched base pairs with the target KRAS RNA sequence can be interspersed by nucleotides that base pair with the target KRAS RNA sequence (e.g., for a DsiRNA possessing mismatch-forming nucleotides at positions 17 and 20 (starting from the 5′ terminus (position 1) of the antisense strand of the 25/27mer agent shown in FIG. 1), but not at positions 18 and 19, the mismatched residues of sense strand positions 17 and 20 are interspersed by two nucleotides that form matched base pairs with corresponding residues of the target KRAS RNA sequence). For example, two residues of the antisense strand (located within the mismatch-tolerant region of the antisense strand) that form mismatched base pairs with the corresponding target KRAS RNA sequence can occur with zero, one, two, three, four or five matched base pairs (with respect to target KRAS RNA sequence) located between these mismatch-forming base pairs.

[0202] For certain DsiRNAs possessing three mismatch-forming base pairs (mismatch-forming with respect to target KRAS RNA sequence), mismatch-forming nucleotides can occur consecutively (e.g., in a triplet along the antisense strand nucleotide sequence). Alternatively, nucleotides of the antisense strand that form mismatched base pairs with the target KRAS RNA sequence can be interspersed by nucleotides that form matched base pairs with the target KRAS RNA sequence (e.g., for a DsiRNA possessing mismatched nucleotides at positions 17, 18 and 22, but not at positions 19, 20 and 21, the mismatch-forming residues of antisense strand positions 17 and 18 are adjacent to one another, while the mismatch-forming residues of antisense strand positions 18 and 22 are interspersed by three nucleotides that form matched base pairs with corresponding residues of the target KRAS RNA). For example, three residues of the antisense strand (located within the mismatch-tolerant region of the antisense strand) that form mismatched base pairs with the corresponding target KRAS RNA sequence can occur with zero, one, two, three or four matched base pairs located between any two of these mismatch-forming base pairs.

[0203] For certain DsiRNAs possessing four mismatch-forming base pairs (mismatch-forming with respect to target KRAS RNA sequence), mismatch-forming nucleotides can occur consecutively (e.g., in a quadruplet along the sense strand nucleotide sequence). Alternatively, nucleotides of the antisense strand that form mismatched base pairs with the target KRAS RNA sequence can be interspersed by nucleotides that form matched base pairs with the target KRAS RNA sequence (e.g., for a DsiRNA possessing mismatch-forming nucleotides at positions 17, 19, 21 and 22, but not at positions 18 and 20, the mismatch-forming residues of antisense strand positions 21 and 22 are adjacent to one another, while the mismatch-forming residues of antisense strand positions 17 and 19 are interspersed by one nucleotide that forms a matched base pair with the corresponding residue of the target KRAS RNA sequence—similarly, the mismatch-forming residues of antisense strand positions 19 and 21 are also interspersed by one nucleotide that forms a matched base pair with the corresponding residue of the target KRAS RNA sequence). For example, four residues of the antisense strand (located within the mismatch-tolerant region of the antisense strand) that form mismatched base pairs with the corresponding target KRAS RNA sequence can occur with zero, one, two or three matched base pairs located between any two of these mismatch-forming base pairs.

[0204] The above DsiRNAmm and other DsiRNA structures are described in order to exemplify certain structures of DsiRNAmm and DsiRNA agents. Design of the above DsiRNAmm and DsiRNA structures can be adapted to generate, e.g., DsiRNAmm forms of other DsiRNA structures shown infra. As exemplified above, DsiRNAs can also be designed that possess single mismatches (or two, three or four mismatches) between the antisense strand of the DsiRNA and a target sequence, yet optionally can retain perfect complementarity between sense and antisense strand sequences of a DsiRNA.

[0205] It is further noted that the DsiRNA agents exemplified infra can also possess insertion/deletion (in/del) structures within their double-stranded and/or target KRAS RNA-aligned structures. Accordingly, the DsiRNAs of the invention can be designed to possess in/del variations in, e.g., antisense strand sequence as compared to target KRAS RNA sequence and/or antisense strand sequence as compared to sense strand sequence, with preferred location(s) for placement of such in/del nucleotides corresponding to those locations described above for positioning of mismatched and/or mismatch-forming base pairs.

[0206] It is also noted that the DsiRNAs of the instant invention can tolerate mismatches within the 3′-terminal region of the sense strand/5′-terminal region of the antisense strand, as this region is modeled to be processed by Dicer and liberated from the guide strand sequence that loads into RISC. Exemplary DsiRNA structures of the invention that harbor such mismatches include the following:

Target RNA Sequence:
5′-. . . XXXXXXXXXXXXXXXXXXXXXHXXX . . .3′
DsiRNA Sense Strand:
5′-pXXXXXXXXXXXXXXXXXXXXXIXDD-3′
DsiRNA Antisense Strand:
3′-XXXXXXXXXXXXXXXXXXXXXXXJXXXp-5′
Target RNA Sequence:
5′-. . . XXXXXXXXXXXXXXXXXXXXXXHXX . . .-3′
DsiRNA Sense Strand:
5′-pXXXXXXXXXXXXXXXXXXXXXXIDD-3′
DsiRNA Antisense Strand:
3′-XXXXXXXXXXXXXXXXXXXXXXXXJXXp-5′
Target RNA Sequence:
5′-. . . XXXXXXXXXXXXXXXXXXXXXXXHX . . .-3′
DsiRNA Sense Strand:
5′-pXXXXXXXXXXXXXXXXXXXXXXXID-3′
DsiRNA Antisense Strand:
3′-XXXXXXXXXXXXXXXXXXXXXXXXXJXp-5′
Target RNA Sequence:
5′-. . . XXXXXXXXXXXXXXXXXXXXXXXXH . . .-3′
DsiRNA Sense Strand:
5′-pXXXXXXXXXXXXXXXXXXXXXXXDI-3′
DsiRNA Antisense Strand:
3′-XXXXXXXXXXXXXXXXXXXXXXXXXXJp-5′

wherein “X”=RNA, “D”=DNA, “p”=a phosphate group, “I” and “J”=Nucleic acid residues (RNA, DNA or non-natural or modified nucleic acids) that do not base pair (hydrogen bond) with one another, yet optionally “J” is complementary to target RNA sequence nucleotide “H”. Any of the residues of such agents can optionally be 2′-O-methyl RNA monomers—alternating positioning of 2′-O-methyl RNA monomers that commences from the 3′-terminal residue of the bottom (second) strand, as shown above—or any of the above-described methylation patterns—can also be used in the above DsiRNA agents. The above mismatches can also be combined within the DsiRNAs of the instant invention.

[0207] In the below structures, such mismatches are introduced within the asymmetric KRAS-420 DsiRNA (newly-introduced mismatch residues are italicized):

KRAS-420 25/27mer DsiRNA, mismatch position=22 of sense strand (from 5′-terminus)

(SEQ ID NO: 5136)
5′-GUAUUUGCCAUAAAUAAUACU^{C}Aat-3′
(SEQ ID NO: 26)
3′-CACAUAAACGGUAUUUAUUAUGA_{U}UA-5′

Optionally, the mismatched “C” residue of position 22 of the sense strand is alternatively “G” or “U”.
KRAS-420 25/27mer DsiRNA, mismatch position=23 of sense strand

(SEQ ID NO: 5137)
5′-GUAUUUGCCAUAAAUAAUACUA^{C}at-3′
(SEQ ID NO: 26)
3′-CACAUAAACGGUAUUUAUUAUGAU_{U}UA-5′

Optionally, the mismatched “C” residue of position 23 of the sense strand is alternatively “G” or “U”.
KRAS-420 25/27mer DsiRNA, mismatch position=24 of sense strand

(SEQ ID NO: 5138)
5′-GUAUUUGCCAUAAAUAAUACUAA^{c}t-3′
(SEQ ID NO: 26)
3′-CACAUAAACGGUAUUUAUUAUGAUU_{U}A-5′

Optionally, the mismatched “c” residue of position 24 of the sense strand is alternatively “g” or
KRAS-420 25/27mer DsiRNA, mismatch position=25 of sense strand

(SEQ ID NO: 5139)
5′-GUAUUUGCCAUAAAUAAUACUAAa^{g}-3′
(SEQ ID NO: 26)
3′-CACAUAAACGGUAUUUAUUAUGAUUU_{A}-5′

Optionally, the mismatched “g” residue of position 25 of the sense strand is alternatively “c” or “U”.
KRAS-420 25/27mer DsiRNA, mismatch position=1 of antisense strand

(SEQ ID NO: 105)
5′-GUAUUUGCCAUAAAUAAUACUAAa^{t}-3′
(SEQ ID NO: 5140)
3′-CACAUAAACGGUAUUUAUUAUGAUUU_{C}-5′

Optionally, the mismatched “C” residue of position 1 of the antisense strand is alternatively “G” or “U”.
KRAS-420 25/27mer DsiRNA, mismatch position=2 of antisense strand

(SEQ ID NO: 105)
5′-GUAUUUGCCAUAAAUAAUACUAA^{a}t-3′
(SEQ ID NO: 5141)
3′-CACAUAAACGGUAUUUAUUAUGAUU_{C}A-5′

Optionally, the mismatched “C” residue of position 2 of the antisense strand is alternatively “G” or “A”.
KRAS-420 25/27mer DsiRNA, mismatch position=3 of antisense strand

(SEQ ID NO: 105)
5′-GUAUUUGCCAUAAAUAAUACUA^{A}at-3′
(SEQ ID NO: 5142)
3′-CACAUAAACGGUAUUUAUUAUGAU_{G}UA-5′

Optionally, the mismatched “G” residue of position 3 of the antisense strand is alternatively “A” or “C”.
KRAS-420 25/27mer DsiRNA, mismatch position=4 of antisense strand

(SEQ ID NO: 105)
5′-GUAUUUGCCAUAAAUAAUACU^{A}Aat-3′
(SEQ ID NO: 5143)
3′-CACAUAAACGGUAUUUAUUAUGA_{G}UUA-5′

Optionally, the mismatched “G” residue of position 4 of the antisense strand is alternatively “A” or “C”.

[0208] As noted above, introduction of such mismatches can be performed upon any of the DsiRNAs described herein.

[0209] The mismatches of such DsiRNA structures can be combined to produce a DsiRNA possessing, e.g., two, three or even four mismatches within the 3′-terminal four nucleotides of the sense strand/5′-terminal four nucleotides of the antisense strand.

[0210] Indeed, in view of the flexibility of sequences which can be incorporated into DsiRNAs at the 3′-terminal residues of the sense strand/5′-terminal residues of the antisense strand, in certain embodiments, the sequence requirements of an asymmetric DsiRNA of the instant invention can be represented as the following (minimalist) structure (shown for an exemplary KRAS-420 DsiRNA sequence):

(SEQ ID NO: 6839)
5′-GUAUUUGCCAUAAAUAAUACUXXX[X]ₙ-3′
(SEQ ID NO: 6840)
3′-CACAUAAACGGUAUUUAUUAUXXXXX[X]ₙ-5′

where n=1 to 5, 1 to 10, 1 to 20, 1 to 30, 1 to 50, or 1 to 80 or more.

KRAS-420 Target:
(SEQ ID NO: 6841)
5′-GTGTATTTGCCATAAATAATAXXXXXX-3′

[0211] The KRAS target sight may also be a site which is targeted by one or more of several oligonucleotides whose complementary target sites overlap with a stated target site. For example, for the exemplary KRAS-420 DsiRNA, it is noted that certain DsiRNAs targeting overlapping and only slightly offset KRAS sequences can exhibit activity levels similar to that of KRAS-420 (specifically, see KRAS-415, KRAS-417 and KRAS-418 DsiRNAs of FIG. 10, and KRAS-422, KRAS-423, KRAS-424, KRAS-425 and KRAS-426 DsiRNAs of Table 9 and FIGS. 12 and 13. Thus, in certain embodiments, a designated target sequence region can be effectively targeted by a series of DsiRNAs possessing largely overlapping sequences. (E.g., if considering DsiRNAs surrounding the KRAS-420 site, a more encompassing KRAS target sequence might be recited as, e.g., 5′-TCTTTGTGTATTTGCCATAAATAATACTAAATCA-3′ (SEQ ID NO: 6842), wherein any given DsiRNA (e.g., a DsiRNA selected from KRAS-415, KRAS-417, KRAS-418, KRAS-420, KRAS-422, KRAS-423, KRAS-424, KRAS-425 and KRAS-426) only targets a sub-sequence within such a sequence region, yet the entire sequence can be considered a viable target for such a series of DsiRNAs).

[0212] Additionally and/or alternatively, mismatches within the 3′-terminal four nucleotides of the sense strand/5′-terminal four nucleotides of the antisense strand can be combined with mismatches positioned at other mismatch-tolerant positions, as described above.

[0213] In view of the present identification of the above-described Dicer substrate agents (DsiRNAs) as inhibitors of KRAS levels via targeting of specific KRAS sequences, it is also recognized that DsiRNAs having structures similar to those described herein can also be synthesized which target other sequences within the KRAS sequence of SEQ ID NO: 1 or SEQ ID NO: 3, or within variants thereof (e.g., target sequences possessing 80% identity, 90% identity, 95% identity, 96% identity, 97% identity, 98% identity, 99% or more identity to a sequence of SEQ ID NO: 1 and/or SEQ ID NO: 3).

### Anti-KRAS DsiRNA Design/Synthesis

[0214] It has been found empirically that longer dsRNA species of from 25 to 35 nucleotides (DsiRNAs) and especially from 25 to 30 nucleotides give unexpectedly effective results in terms of potency and duration of action, as compared to 19-23mer siRNA agents. Without wishing to be bound by the underlying theory of the dsRNA processing mechanism, it is thought that the longer dsRNA species serve as a substrate for the Dicer enzyme in the cytoplasm of a cell. In addition to cleaving the dsRNA of the invention into shorter segments, Dicer is thought to facilitate the incorporation of a single-stranded cleavage product derived from the cleaved dsRNA into the RISC complex that is responsible for the destruction of the cytoplasmic RNA (e.g., KRAS RNA) of or derived from the target gene, KRAS (or other gene associated with a KRAS-associated disease or disorder). Prior studies (Rossi et al., U.S. Patent Application No. 2007/0265220) have shown that the cleavability of a dsRNA species (specifically, a DsiRNA agent) by Dicer corresponds with increased potency and duration of action of the dsRNA species.

[0215] Certain preferred anti-KRAS DsiRNA agents were selected from a pre-screened population. Design of DsiRNAs can optionally involve use of predictive scoring algorithms that perform in silico assessments of the projected activity/efficacy of a number of possible DsiRNA agents spanning a region of sequence. Information regarding the design of such scoring algorithms can be found, e.g., in Gong et al. (BMC Bioinformatics 2006, 7:516), though a more recent “v3” algorithm represents a theoretically improved algorithm relative to siRNA scoring algorithms previously available in the art. (The “v3” scoring algorithm is a machine learning algorithm that is not reliant upon any biases in human sequence. In addition, the “v3” algorithm derives from a data set that is approximately three-fold larger than that from which an older “v2” algorithm such as that described in Gong et al. derives.)

[0216] The first and second oligonucleotides of the DsiRNA agents of the instant invention are not required to be completely complementary. In fact, in one embodiment, the 3′-terminus of the sense strand contains one or more mismatches. In one aspect, two mismatches are incorporated at the 3′ terminus of the sense strand. In another embodiment, the DsiRNA of the invention is a double stranded RNA molecule containing two RNA oligonucleotides each of which is 27 nucleotides in length and, when annealed to each other, have blunt ends and a two nucleotide mismatch on the 3′-terminus of the sense strand (the 5′-terminus of the antisense strand). The use of mismatches or decreased thermodynamic stability (specifically at the 3′-sense/5′-antisense position) has been proposed to facilitate or favor entry of the antisense strand into RISC (Schwarz et al., 2003, Cell 115: 199-208; Khvorova et al., 2003, Cell 115: 209-216), presumably by affecting some rate-limiting unwinding steps that occur with entry of the siRNA into RISC. Thus, terminal base composition has been included in design algorithms for selecting active 21mer siRNA duplexes (Ui-Tei et al., 2004, Nucleic Acids Res 32: 936-948; Reynolds et al., 2004, Nat Biotechnol 22: 326-330). With Dicer cleavage of the dsRNA of this embodiment, the small end-terminal sequence which contains the mismatches will either be left unpaired with the antisense strand (become part of a 3′-overhang) or be cleaved entirely off the final 21-mer siRNA. These “mismatches”, therefore, do not persist as mismatches in the final RNA component of RISC. The finding that base mismatches or destabilization of segments at the 3′-end of the sense strand of Dicer substrate improved the potency of synthetic duplexes in RNAi, presumably by facilitating processing by Dicer, was a surprising finding of past works describing the design and use of 25-30mer dsRNAs (also termed “DsiRNAs” herein; Rossi et al., U.S. Patent Application Nos. 2005/0277610, 2005/0244858 and 2007/0265220).

### Modification of Anti-KRAS DsiRNAs

[0217] One major factor that inhibits the effect of double stranded RNAs (“dsRNAs”) is the degradation of dsRNAs (e.g., siRNAs and DsiRNAs) by nucleases. A 3′-exonuclease is the primary nuclease activity present in serum and modification of the 3′-ends of antisense DNA oligonucleotides is crucial to prevent degradation (Eder et al., 1991, Antisense Res Dev, 1: 141-151). An RNase-T family nuclease has been identified called ERI-1 which has 3′ to 5′ exonuclease activity that is involved in regulation and degradation of siRNAs (Kennedy et al., 2004, Nature 427: 645-649; Hong et al., 2005, Biochem J, 390: 675-679). This gene is also known as Thex1 (NM_02067) in mice or THEX1 (NM_153332) in humans and is involved in degradation of histone mRNA; it also mediates degradation of 3′-overhangs in siRNAs, but does not degrade duplex RNA (Yang et al., 2006, J Biol Chem, 281: 30447-30454). It is therefore reasonable to expect that 3′-end-stabilization of dsRNAs, including the DsiRNAs of the instant invention, will improve stability.

[0218] XRN1 (NM_019001) is a 5′ to 3′ exonuclease that resides in P-bodies and has been implicated in degradation of mRNA targeted by miRNA (Rehwinkel et al., 2005, RNA 11: 1640-1647) and may also be responsible for completing degradation initiated by internal cleavage as directed by a siRNA. XRN2 (NM_012255) is a distinct 5′ to 3′ exonuclease that is involved in nuclear RNA processing.

[0219] RNase A is a major endonuclease activity in mammals that degrades RNAs. It is specific for ssRNA and cleaves at the 3′-end of pyrimidine bases. SiRNA degradation products consistent with RNase A cleavage can be detected by mass spectrometry after incubation in serum (Turner et al., 2007, Mol Biosyst 3: 43-50). The 3′-overhangs enhance the susceptibility of siRNAs to RNase degradation. Depletion of RNase A from serum reduces degradation of siRNAs; this degradation does show some sequence preference and is worse for sequences having poly A/U sequence on the ends (Haupenthal et al., 2006 Biochem Pharmacol 71: 702-710). This suggests the possibility that lower stability regions of the duplex may “breathe” and offer transient single-stranded species available for degradation by RNase A. RNase A inhibitors can be added to serum and improve siRNA longevity and potency (Haupenthal et al., 2007, Int J. Cancer 121: 206-210).

[0220] In 21mers, phosphorothioate or boranophosphate modifications directly stabilize the internucleoside phosphate linkage. Boranophosphate modified RNAs are highly nuclease resistant, potent as silencing agents, and are relatively non-toxic. Boranophosphate modified RNAs cannot be manufactured using standard chemical synthesis methods and instead are made by in vitro transcription (IVT) (Hall et al., 2004, Nucleic Acids Res 32: 5991-6000; Hall et al., 2006, Nucleic Acids Res 34: 2773-2781). Phosphorothioate (PS) modifications can be easily placed in the RNA duplex at any desired position and can be made using standard chemical synthesis methods. The PS modification shows dose-dependent toxicity, so most investigators have recommended limited incorporation in siRNAs, favoring the 3′-ends where protection from nucleases is most important (Harborth et al., 2003, Antisense Nucleic Acid Drug Dev 13: 83-105; Chiu and Rana, 2003, Mol Cell 10: 549-561; Braasch et al., 2003, Biochemistry 42: 7967-7975; Amarzguioui et al., 2003, Nucleic Acids Research 31: 589-595). More extensive PS modification can be compatible with potent RNAi activity; however, use of sugar modifications (such as 2′-O-methyl RNA) may be superior (Choung et al., 2006, Biochem Biophys Res Commun 342: 919-927).

[0221] A variety of substitutions can be placed at the 2′-position of the ribose which generally increases duplex stability (Tₘ) and can greatly improve nuclease resistance. 2′-O-methyl RNA is a naturally occurring modification found in mammalian ribosomal RNAs and transfer RNAs. 2′-O-methyl modification in siRNAs is known, but the precise position of modified bases within the duplex is important to retain potency and complete substitution of 2′-O-methyl RNA for RNA will inactivate the siRNA. For example, a pattern that employs alternating 2′-O-methyl bases can have potency equivalent to unmodified RNA and is quite stable in serum (Choung et al., 2006, Biochem Biophys Res Commun 342: 919-927; Czauderna et al., 2003, Nucleic Acids Research 31: 2705-2716).

[0222] The 2′-fluoro (2′-F) modification is also compatible with dsRNA (e.g., siRNA and DsiRNA) function; it is most commonly placed at pyrimidine sites (due to reagent cost and availability) and can be combined with 2′-O-methyl modification at purine positions; 2′-F purines are available and can also be used. Heavily modified duplexes of this kind can be potent triggers of RNAi in vitro (Allerson et al., 2005, J Med Chem 48: 901-904; Prakash et al., 2005, J Med Chem 48: 4247-4253; Kraynack and Baker, 2006, RNA 12: 163-176) and can improve performance and extend duration of action when used in vivo (Morrissey et al., 2005, Hepatology 41: 1349-1356; Morrissey et al., 2005, Nat Biotechnol 23: 1002-1007). A highly potent, nuclease stable, blunt 19mer duplex containing alternative 2′-F and 2′-O-Me bases is taught by Allerson. In this design, alternating 2′-O-Me residues are positioned in an identical pattern to that employed by Czauderna, however the remaining RNA residues are converted to 2′-F modified bases. A highly potent, nuclease resistant siRNA employed by Morrissey employed a highly potent, nuclease resistant siRNA in vivo. In addition to 2′-O-Me RNA and 2′-F RNA, this duplex includes DNA, RNA, inverted abasic residues, and a 3′-terminal PS internucleoside linkage. While extensive modification has certain benefits, more limited modification of the duplex can also improve in vivo performance and is both simpler and less costly to manufacture. Soutschek et al. (2004, Nature 432: 173-178) employed a duplex in vivo and was mostly RNA with two 2′-O-Me RNA bases and limited 3′-terminal PS internucleoside linkages.

[0223] Locked nucleic acids (LNAs) are a different class of 2′-modification that can be used to stabilize dsRNA (e.g., siRNA and DsiRNA). Patterns of LNA incorporation that retain potency are more restricted than 2′-O-methyl or 2′-F bases, so limited modification is preferred (Braasch et al., 2003, Biochemistry 42: 7967-7975; Grunweller et al., 2003, Nucleic Acids Res 31: 3185-3193; Elmen et al., 2005, Nucleic Acids Res 33: 439-447). Even with limited incorporation, the use of LNA modifications can improve dsRNA performance in vivo and may also alter or improve off target effect profiles (Mook et al., 2007, Mol Cancer Ther 6: 833-843).

[0224] Synthetic nucleic acids introduced into cells or live animals can be recognized as “foreign” and trigger an immune response. Immune stimulation constitutes a major class of off-target effects which can dramatically change experimental results and even lead to cell death. The innate immune system includes a collection of receptor molecules that specifically interact with DNA and RNA that mediate these responses, some of which are located in the cytoplasm and some of which reside in endosomes (Marques and Williams, 2005, Nat Biotechnol 23: 1399-1405; Schlee et al., 2006, Mol Ther 14: 463-470). Delivery of siRNAs by cationic lipids or liposomes exposes the siRNA to both cytoplasmic and endosomal compartments, maximizing the risk for triggering a type 1 interferon (IFN) response both in vitro and in vivo (Morrissey et al., 2005, Nat Biotechnol 23: 1002-1007; Sioud and Sorensen, 2003, Biochem Biophys Res Commun 312: 1220-1225; Sioud, 2005, J Mol Biol 348: 1079-1090; Ma et al., 2005, Biochem Biophys Res Commun 330: 755-759). RNAs transcribed within the cell are less immunogenic (Robbins et al., 2006, Nat Biotechnol 24: 566-571) and synthetic RNAs that are immunogenic when delivered using lipid-based methods can evade immune stimulation when introduced unto cells by mechanical means, even in vivo (Heidel et al., 2004, Nat Biotechnol 22: 1579-1582). However, lipid based delivery methods are convenient, effective, and widely used. Some general strategy to prevent immune responses is needed, especially for in vivo application where all cell types are present and the risk of generating an immune response is highest. Use of chemically modified RNAs may solve most or even all of these problems.

[0225] In certain embodiments, modifications can be included in the anti-KRAS DsiRNA agents of the present invention so long as the modification does not prevent the DsiRNA agent from possessing KRAS inhibitory activity. In one embodiment, one or more modifications are made that enhance Dicer processing of the DsiRNA agent (an assay for determining Dicer processing of a DsiRNA is described supra). In a second embodiment, one or more modifications are made that result in more effective KRAS inhibition (as described herein, KRAS inhibition/KRAS inhibitory activity of a DsiRNA can be assayed via art-recognized methods for determining RNA levels, or for determining Kras polypeptide levels, should such levels be assessed in lieu of or in addition to assessment of, e.g., KRAS mRNA levels). In a third embodiment, one or more modifications are made that support greater KRAS inhibitory activity (means of determining KRAS inhibitory activity are described supra). In a fourth embodiment, one or more modifications are made that result in greater potency of KRAS inhibitory activity per each DsiRNA agent molecule to be delivered to the cell (potency of KRAS inhibitory activity is described supra). Modifications can be incorporated in the 3′-terminal region, the 5′-terminal region, in both the 3′-terminal and 5′-terminal region or in some instances in various positions within the sequence. With the restrictions noted above in mind, numbers and combinations of modifications can be incorporated into the DsiRNA agent. Where multiple modifications are present, they may be the same or different. Modifications to bases, sugar moieties, the phosphate backbone, and their combinations are contemplated. Either 5′-terminus can be phosphorylated.

[0226] Examples of modifications contemplated for the phosphate backbone include phosphonates, including methylphosphonate, phosphorothioate, and phosphotriester modifications such as alkylphosphotriesters, and the like. Examples of modifications contemplated for the sugar moiety include 2′-alkyl pyrimidine, such as 2′-O-methyl, 2′-fluoro, amino, and deoxy modifications and the like (see, e.g., Amarzguioui et al., 2003, Nucleic Acids Research 31: 589-595). Examples of modifications contemplated for the base groups include abasic sugars, 2-O-alkyl modified pyrimidines, 4-thiouracil, 5-bromouracil, 5-iodouracil, and 5-(3-aminoallyl)-uracil and the like. Locked nucleic acids, or LNA's, could also be incorporated. Many other modifications are known and can be used so long as the above criteria are satisfied. Examples of modifications are also disclosed in U.S. Pat. Nos. 5,684,143, 5,858,988 and 6,291,438 and in U.S. published patent application No. 2004/0203145 A1. Other modifications are disclosed in Herdewijn (2000, Antisense Nucleic Acid Drug Dev 10: 297-310), Eckstein (2000, Antisense Nucleic Acid Drug Dev 10: 117-21), Rusckowski et al. (2000, Antisense Nucleic Acid Drug Dev 10: 333-345), Stein et al. (2001, Antisense Nucleic Acid Drug Dev 11: 317-25); Vorobjev et al. (2001, Antisense Nucleic Acid Drug Dev 11: 77-85).

[0227] One or more modifications contemplated can be incorporated into either strand. The placement of the modifications in the DsiRNA agent can greatly affect the characteristics of the DsiRNA agent, including conferring greater potency and stability, reducing toxicity, enhance Dicer processing, and minimizing an immune response. In one embodiment, the antisense strand or the sense strand or both strands have one or more 2′-O-methyl modified nucleotides. In another embodiment, the antisense strand contains 2′-O-methyl modified nucleotides. In another embodiment, the antisense stand contains a 3′ overhang that is comprised of 2′-O-methyl modified nucleotides. The antisense strand could also include additional 2′-O-methyl modified nucleotides.

[0228] In certain embodiments of the present invention, the anti-KRAS DsiRNA agent has one or more of the following properties: (i) the DsiRNA agent is asymmetric, e.g., has a 3′ overhang on the antisense strand and (ii) the DsiRNA agent has a modified 3′ end on the sense strand to direct orientation of Dicer binding and processing of the dsRNA to an active siRNA. According to this embodiment, the longest strand in the dsRNA comprises 25-35 nucleotides (e.g., 25, 26, 27, 28, 29, 30, 31, 32, 33, 34 or 35 nucleotides). In certain such embodiments, the DsiRNA agent is asymmetric such that the sense strand comprises 25-34 nucleotides and the 3′ end of the sense strand forms a blunt end with the 5′ end of the antisense strand while the antisense strand comprises 26-35 nucleotides and forms an overhang on the 3′ end of the antisense strand. In one embodiment, the DsiRNA agent is asymmetric such that the sense strand comprises 25-28 nucleotides and the antisense strand comprises 25-30 nucleotides. Thus, the resulting dsRNA has an overhang on the 3′ end of the antisense strand. The overhang is 1˜4 nucleotides, for example 2 nucleotides. The sense strand may also have a 5′ phosphate.

[0229] In other embodiments, the sense strand of the DsiRNA agent is modified for Dicer processing by suitable modifiers located at the 3′ end of the sense strand, i.e., the DsiRNA agent is designed to direct orientation of Dicer binding and processing. Suitable modifiers include nucleotides such as deoxyribonucleotides, dideoxyribonucleotides, acyclonucleotides and the like and sterically hindered molecules, such as fluorescent molecules and the like. Acyclonucleotides substitute a 2-hydroxyethoxymethyl group for the 2′-deoxyribofuranosyl sugar normally present in dNMPs. Other nucleotides modifiers could include 3′-deoxyadenosine (cordycepin), 3′-azido-3′-deoxythymidine (AZT), 2′,3′-dideoxyinosine (ddI), 2′,3′-dideoxy-3′-thiacytidine (3TC), 2′,3′-didehydro-2′,3′-dideoxythymidine (d4T) and the monophosphate nucleotides of 3′-azido-3′-deoxythymidine (AZT), 2′,3′-dideoxy-3′-thiacytidine (3TC) and 2′,3′-didehydro-2′,3′-dideoxythymidine (d4T). In one embodiment, deoxynucleotides are used as the modifiers. When nucleotide modifiers are utilized, 1-3 nucleotide modifiers, or 2 nucleotide modifiers are substituted for the ribonucleotides on the 3′ end of the sense strand. When sterically hindered molecules are utilized, they are attached to the ribonucleotide at the 3′ end of the antisense strand. Thus, the length of the strand does not change with the incorporation of the modifiers. In another embodiment, the invention contemplates substituting two DNA bases in the DsiRNA agent to direct the orientation of Dicer processing of the antisense strand. In a further embodiment of the present invention, two terminal DNA bases are substituted for two ribonucleotides on the 3′-end of the sense strand forming a blunt end of the duplex on the 3′ end of the sense strand and the 5′ end of the antisense strand, and a two-nucleotide RNA overhang is located on the 3′-end of the antisense strand. This is an asymmetric composition with DNA on the blunt end and RNA bases on the overhanging end.

[0230] The sense and antisense strands of a DsiRNA agent of the instant invention anneal under biological conditions, such as the conditions found in the cytoplasm of a cell. In addition, a region of one of the sequences, particularly of the antisense strand, of the DsiRNA agent has a sequence length of at least 19 nucleotides, wherein these nucleotides are in the 21-nucleotide region adjacent to the 3′ end of the antisense strand and are sufficiently complementary to a nucleotide sequence of the RNA produced from the target gene.

[0231] The DsiRNA agent can also have one or more of the following additional properties: (a) the antisense strand has a right shift from the typical 21mer (e.g., the DsiRNA comprises a length of antisense strand nucleotides that extends to the 5′ of a projected Dicer cleavage site within the DsiRNA, with such antisense strand nucleotides base paired with corresponding nucleotides of the sense strand extending 3′ of a projected Dicer cleavage site in the sense strand), (b) the strands may not be completely complementary, i.e., the strands may contain simple mismatched base pairs (in certain embodiments, the DsiRNAs of the invention possess 1, 2, 3, 4 or even 5 or more mismatched base pairs, provided that KRAS inhibitory activity of the DsiRNA possessing mismatched base pairs is retained at sufficient levels (e.g., retains at least 50% KRAS inhibitory activity or more, at least 60% KRAS inhibitory activity or more, at least 70% KRAS inhibitory activity or more, at least 80% KRAS inhibitory activity or more, at least 90% KRAS inhibitory activity or more or at least 95% KRAS inhibitory activity or more as compared to a corresponding DsiRNA not possessing mismatched base pairs. In certain embodiments, mismatched base pairs exist between the antisense and sense strands of a DsiRNA. In some embodiments, mismatched base pairs exist (or are predicted to exist) between the antisense strand and the target RNA. In certain embodiments, the presence of a mismatched base pair(s) between an antisense strand residue and a corresponding residue within the target RNA that is located 3′ in the target RNA sequence of a projected Ago2 cleavage site retains and may even enhance KRAS inhibitory activity of a DsiRNA of the invention) and (c) base modifications such as locked nucleic acid(s) may be included in the 5′ end of the sense strand. A “typical” 21mer siRNA is designed using conventional techniques. In one technique, a variety of sites are commonly tested in parallel or pools containing several distinct siRNA duplexes specific to the same target with the hope that one of the reagents will be effective (Ji et al., 2003, FEBS Lett 552: 247-252). Other techniques use design rules and algorithms to increase the likelihood of obtaining active RNAi effector molecules (Schwarz et al., 2003, Cell 115: 199-208; Khvorova et al., 2003, Cell 115: 209-216; Ui-Tei et al., 2004, Nucleic Acids Res 32: 936-948; Reynolds et al., 2004, Nat Biotechnol 22: 326-330; Krol et al., 2004, J Biol Chem 279: 42230-42239; Yuan et al., 2004, Nucl Acids Res 32(Webserver issue):W130-134; Boese et al., 2005, Methods Enzymol 392: 73-96). High throughput selection of siRNA has also been developed (U.S. published patent application No. 2005/0042641 A1). Potential target sites can also be analyzed by secondary structure predictions (Heale et al., 2005, Nucleic Acids Res 33(3): e30). This 21mer is then used to design a right shift to include 3-9 additional nucleotides on the 5′ end of the 21mer. The sequence of these additional nucleotides is not restricted. In one embodiment, the added ribonucleotides are based on the sequence of the target gene. Even in this embodiment, full complementarity between the target sequence and the antisense siRNA is not required.

[0232] The first and second oligonucleotides of a DsiRNA agent of the instant invention are not required to be completely complementary. They only need to be sufficiently complementary to anneal under biological conditions and to provide a substrate for Dicer that produces a siRNA sufficiently complementary to the target sequence. Locked nucleic acids, or LNA's, are well known to a skilled artisan (Elmen et al., 2005, Nucleic Acids Res 33: 439-447; Kurreck et al., 2002, Nucleic Acids Res 30: 1911-1918; Crinelli et al., 2002, Nucleic Acids Res 30: 2435-2443; Braasch and Corey, 2001, Chem Biol 8: 1-7; Bondensgaard et al., 2000, Chemistry 6: 2687-2695; Wahlestedt et al., 2000, Proc Natl Acad Sci USA 97: 5633-5638). In one embodiment, an LNA is incorporated at the 5′ terminus of the sense strand. In another embodiment, an LNA is incorporated at the 5′ terminus of the sense strand in duplexes designed to include a 3′ overhang on the antisense strand.

[0233] In certain embodiments, the DsiRNA agent of the instant invention has an asymmetric structure, with the sense strand having a 25-base pair length, and the antisense strand having a 27-base pair length with a 2 base 3′-overhang. In other embodiments, this DsiRNA agent having an asymmetric structure further contains 2 deoxynucleotides at the 3′ end of the sense strand in place of two of the ribonucleotides.

[0234] Certain DsiRNA agent compositions containing two separate oligonucleotides can be linked by a third structure. The third structure will not block Dicer activity on the DsiRNA agent and will not interfere with the directed destruction of the RNA transcribed from the target gene. In one embodiment, the third structure may be a chemical linking group. Many suitable chemical linking groups are known in the art and can be used. Alternatively, the third structure may be an oligonucleotide that links the two oligonucleotides of the DsiRNA agent in a manner such that a hairpin structure is produced upon annealing of the two oligonucleotides making up the dsRNA composition. The hairpin structure will not block Dicer activity on the DsiRNA agent and will not interfere with the directed destruction of the KRAS RNA.

[0235] In certain embodiments, the anti-KRAS DsiRNA agent of the invention has several properties which enhance its processing by Dicer. According to such embodiments, the DsiRNA agent has a length sufficient such that it is processed by Dicer to produce an siRNA and at least one of the following properties: (i) the DsiRNA agent is asymmetric, e.g., has a 3′ overhang on the sense strand and (ii) the DsiRNA agent has a modified 3′ end on the antisense strand to direct orientation of Dicer binding and processing of the dsRNA to an active siRNA. According to these embodiments, the longest strand in the DsiRNA agent comprises 25-30 nucleotides. In one embodiment, the sense strand comprises 25-30 nucleotides and the antisense strand comprises 25-28 nucleotides. Thus, the resulting dsRNA has an overhang on the 3′ end of the sense strand. The overhang is 1-4 nucleotides, such as 2 nucleotides. The antisense strand may also have a 5′ phosphate.

[0236] In certain embodiments, the sense strand of a DsiRNA agent is modified for Dicer processing by suitable modifiers located at the 3′ end of the sense strand, i.e., the DsiRNA agent is designed to direct orientation of Dicer binding and processing. Suitable modifiers include nucleotides such as deoxyribonucleotides, dideoxyribonucleotides, acyclonucleotides and the like and sterically hindered molecules, such as fluorescent molecules and the like. Acyclonucleotides substitute a 2-hydroxyethoxymethyl group for the 2′-deoxyribofuranosyl sugar normally present in dNMPs. Other nucleotide modifiers could include 3′-deoxyadenosine (cordycepin), 3′-azido-3′-deoxythymidine (AZT), 2′,3′-dideoxyinosine (ddI), 2′,3′-dideoxy-3′-thiacytidine (3TC), 2′,3′-didehydro-2′,3′-dideoxythymidine (d4T) and the monophosphate nucleotides of 3′-azido-3′-deoxythymidine (AZT), 2′,3′-dideoxy-3′-thiacytidine (3TC) and 2′,3′-didehydro-2′,3′-dideoxythymidine (d4T). In one embodiment, deoxynucleotides are used as the modifiers. When nucleotide modifiers are utilized, 1-3 nucleotide modifiers, or 2 nucleotide modifiers are substituted for the ribonucleotides on the 3′ end of the sense strand. When sterically hindered molecules are utilized, they are attached to the ribonucleotide at the 3′ end of the antisense strand. Thus, the length of the strand does not change with the incorporation of the modifiers. In another embodiment, the invention contemplates substituting two DNA bases in the dsRNA to direct the orientation of Dicer processing. In a further invention, two terminal DNA bases are located on the 3′ end of the sense strand in place of two ribonucleotides forming a blunt end of the duplex on the 5′ end of the antisense strand and the 3′ end of the sense strand, and a two-nucleotide RNA overhang is located on the 3′-end of the antisense strand. This is an asymmetric composition with DNA on the blunt end and RNA bases on the overhanging end.

[0237] In certain other embodiments, the antisense strand of a DsiRNA agent is modified for Dicer processing by suitable modifiers located at the 3′ end of the antisense strand, i.e., the DsiRNA agent is designed to direct orientation of Dicer binding and processing. Suitable modifiers include nucleotides such as deoxyribonucleotides, dideoxyribonucleotides, acyclonucleotides and the like and sterically hindered molecules, such as fluorescent molecules and the like. Acyclonucleotides substitute a 2-hydroxyethoxymethyl group for the 2′-deoxyribofuranosyl sugar normally present in dNMPs. Other nucleotide modifiers could include 3′-deoxyadenosine (cordycepin), 3′-azido-3′-deoxythymidine (AZT), 2′,3′-dideoxyinosine (ddI), 2′,3′-dideoxy-3′-thiacytidine (3TC), 2′,3′-didehydro-2′,3′-dideoxythymidine (d4T) and the monophosphate nucleotides of 3′-azido-3′-deoxythymidine (AZT), 2′,3′-dideoxy-3′-thiacytidine (3TC) and 2′,3′-didehydro-2′,3′-dideoxythymidine (d4T). In one embodiment, deoxynucleotides are used as the modifiers. When nucleotide modifiers are utilized, 1-3 nucleotide modifiers, or 2 nucleotide modifiers are substituted for the ribonucleotides on the 3′ end of the antisense strand. When sterically hindered molecules are utilized, they are attached to the ribonucleotide at the 3′ end of the antisense strand. Thus, the length of the strand does not change with the incorporation of the modifiers. In another embodiment, the invention contemplates substituting two DNA bases in the dsRNA to direct the orientation of Dicer processing. In a further invention, two terminal DNA bases are located on the 3′ end of the antisense strand in place of two ribonucleotides forming a blunt end of the duplex on the 5′ end of the sense strand and the 3′ end of the antisense strand, and a two-nucleotide RNA overhang is located on the 3′-end of the sense strand. This is also an asymmetric composition with DNA on the blunt end and RNA bases on the overhanging end.

[0238] The sense and antisense strands anneal under biological conditions, such as the conditions found in the cytoplasm of a cell. In addition, a region of one of the sequences, particularly of the antisense strand, of the dsRNA has a sequence length of at least 19 nucleotides, wherein these nucleotides are adjacent to the 3′ end of antisense strand and are sufficiently complementary to a nucleotide sequence of the target KRAS RNA.

[0239] Additionally, the DsiRNA agent structure can be optimized to ensure that the oligonucleotide segment generated from Dicer's cleavage will be the portion of the oligonucleotide that is most effective in inhibiting gene expression. For example, in one embodiment of the invention, a 27-bp oligonucleotide of the DsiRNA agent structure is synthesized wherein the anticipated 21 to 22-bp segment that will inhibit gene expression is located on the 3′-end of the antisense strand. The remaining bases located on the 5′-end of the antisense strand will be cleaved by Dicer and will be discarded. This cleaved portion can be homologous (i.e., based on the sequence of the target sequence) or non-homologous and added to extend the nucleic acid strand.

[0240] U.S. 2007/0265220 discloses that 27mer DsiRNAs show improved stability in serum over comparable 21mer siRNA compositions, even absent chemical modification. Modifications of DsiRNA agents, such as inclusion of 2′-O-methyl RNA in the antisense strand, in patterns such as detailed above, when coupled with addition of a 5′ Phosphate, can improve stability of DsiRNA agents. Addition of 5′-phosphate to all strands in synthetic RNA duplexes may be an inexpensive and physiological method to confer some limited degree of nuclease stability. The chemical modification patterns of the DsiRNA agents of the instant invention are designed to enhance the efficacy of such agents. Accordingly, such modifications are designed to avoid reducing potency of DsiRNA agents; to avoid interfering with Dicer processing of DsiRNA agents; to improve stability in biological fluids (reduce nuclease sensitivity) of DsiRNA agents; or to block or evade detection by the innate immune system. Such modifications are also designed to avoid being toxic and to avoid increasing the cost or impact the ease of manufacturing the instant DsiRNA agents of the invention.

### KRAS Biology and Biochemistry

[0241] Transformation is a cumulative process whereby normal control of cell growth and differentiation is interrupted, usually through the accumulation of mutations affecting the expression of genes that regulate cell growth and differentiation.

[0242] The platelet derived growth factor (PDGF) system has served as a prototype for identification of substrates of the receptor tyrosine kinases. Certain enzymes become activated by the PDGF receptor kinase, including phospholipase C and phosphatidylinositol 3′ kinase, Ras guanosine triphosphate (GTPase) activating protein (GAP) and src-like tyrosine kinases. GAP regulates the function of the Ras protein by stimulating the GTPase activity of the 21 kD Ras protein. Barbacid, 56 Ann. Rev. Biochem. 779, 1987. Microinjection of oncogenically activated Ras into NIH 3T3 cells has been shown to induce DNA synthesis. Mutations that cause oncogenic activation of Ras lead to accumulation of Ras bound to GTP, the active form of the molecule. These mutations block the ability of GAP to convert Ras to the inactive form. Mutations that impair the interactions of Ras with GAP also block the biological function of Ras.

[0243] While a number of Ras alleles exist (N-Ras, KRAS, H-Ras) which have been implicated in carcinogenesis, the type most often associated with colon and pancreatic carcinomas is KRAS. Nucleic acid molecules which are targeted to certain regions of the KRAS allelic mRNAs may also prove inhibitory to the function of the other allelic mRNAs of the N-Ras and H-Ras genes.

[0244] The use of DsiRNA agents targeting KRAS therefore provides a class of novel therapeutic agents that can be used in the treatment, alleviation, or prevention of cancer and/or proliferative diseases, conditions, or disorders, alone or in combination with other therapies.

[0245] Known human KRAS gene and polypeptide sequences include the following:

Wild-typeKRAS sequence (SEQ ID NO: 1;
K-Ras4A-transcript variant a;
GenBank Accession No. NM_033360.2):
GGCCGCGGCGGCGGAGGCAGCAGCGGCGGCGGCAG
TGGCGGCGGCGAAGGTGGCGGCGGCTCGGCCAGTA
CTCCCGGCCCCCGCCATTTCGGACTGGGAGCGAGC
GCGGCGCAGGCACTGAAGGCGGCGGCGGGGCCAGA
GGCTCAGCGGCTCCCAGGTGCGGGAGAGAGGCCTG
CTGAAAATGACTGAATATAAACTTGTGGTAGTTGG
AGCTGGTGGCGTAGGCAAGAGTGCCTTGACGATAC
AGCTAATTCAGAATCATTTTGTG [symbol] ACGAATATGAT
CCAACAATAGAGGATTCCTACAGGAAGCAAGTAGT
AATTGATGGAGAAACCTGTCTCTTGGATATTCTCG
ACACAGCAGGTCA [symbol] GAGGAGTACAGTGCAATGAGG
GACCAGTACATGAGGACTGGGGAGGGCTTTCTTTG
TGTATTTGCCATAAATAATACTAAATCATTTGAAG
ATATTCACCATTATAGAGAACAAATTAAAAGAGTT
AAGGACTCTGAAGATGTACCTATGGTCCTAGTAGG
AAATAAATGTGATTTGCCTTCTAGAACAGTAGACA
CAAAACAGGCTCAGGACTTAGCAAGAAGTTATGGA
ATTCCTTTTATTGAAACATCAGCAAAGACAAGACA
GAGAGTGGAGGATGCTTTTTATACATTGGTGAGGG
AGATCCGACAATACAGATTGAAAAAAATCAGCAAA
GAAGAAAAGACTCCTGGCTGTGTGAAAATTAAAAA
ATGCATTATAATGTAATCTGGGTGTTGATGATGCC
TTCTATACATTAGTTCGAGAAATTCGAAAACATAA
AGAAAAGATGAGCAAAGA [symbol] GGTAAAAAGAAGAAAA
AGAAGTCAAAGACAAAGTGTGTAATTATGTAAATA
CAATTTGTACTTTTTTCTTAAGGCATACTAGTACA
AGTGGTAATTTTTGTACATTACACTAAATTATTAG
CATTTGTTTTAGCATTACCTAATTTTTTTCCTGCT
CCATGCAGACTGTTAGCTTTTACCTTAAATGCTTA
TTTTAAAATGACAGTGGAAGTTTTTTTTTCCTCTA
AGTGCCAGTATTCCCAGAGTTTTGGTTTTTGAACT
AGCAATGCCTGTGAAAAAGAAACTGAATACCTAAG
ATTTCTGTCTTGGGGTTTTTGGTGCATGCAGTTGA
TTACTTCTTATTTTTCTTACCAATTGTGAATGTTG
GTGTGAAAGAAATTAATGAAGCTTTTGAATCATCC
CTATTCTGTGTTTTATCTAGTCAGATAAATGGATT
AATTACTAATTTCAGTTGAGACCTTCTAATTGGTT
TTTACTGAAACATTGAGGGAAGACAAATTTATGGG
CTTCCTGATGATGATTCTTCTAGGCATCATGTCCT
ATAGTTTGTCATCCCTGATGAATGTAAAGTTAGAC
TGTTCACAAAGGTTTTGTCTCCTTTCCACTGCTAT
TAGTCATGGTCACTCTCCCCAAAATATTATATTTT
TTCTATAAAAAGAAAAAAATGGAAAAAAATTAGAA
GGCAATGGAAACTATTATAAGGCCATTTCCTTTTC
ACATTAGATAAATTACTATAAAGACTCCTAATAGC
TTTTCCTGTTAAGGCAGACCCAGTATGAAATGGGG
ATTATTATAGCAACCATTTTGGGGCTATATTTACA
TGCTACTAAATTTTTATAATAATTGAAAAGATTTT
AAGAAGTATAAAAAATTCTCATAGGAATTAAATGT
AGTCTCCCTGTGTCAGACTGCTCTTTCATAGTATA
ACTTTAAATCTTTTCTTCAACTTGAGTCTTTGAAG
ATAGTTTTAATTCTGCTTGTGAGATTAAAAGATTA
TTTGGGCCAGTTATAGCTTATTAGGTGTTGAAGAG
ACCAAGGTTGCAAGGCCAGGCCCTGTGTGAACCTT
TGAGCTTTCATAGAGAGTTTCACAGCATGGACTGT
GTCCCCACGGTCATCCAGTGTTGTCATGCATTGGT
TAGTCAAAATGGGGAGGGACTAGGGCAGTTTGGAT
AGCTCAACAAGATACAATCTCACTCTGTGGTGGTC
CTGCTGACAAATCAAGAGCATTGCTTTTGTTTCTT
AAGAAAAGAAACTCTTTTTTAAAAATTACTTTTAA
ATATTAACTCAAAAGTTGAGATTTTGGGGTGGTGG
TGTGCCAAGACATTAATTTTTTTTTTAAACAATGA
AGTGAAAAAGTTTTACAATCTCTAGGTTTGGCTAG
TTCTCTTAAGACTGGTTAAATTAACATTGCATAAA
CACTTTTCAAGTCTGATCCATATTTAATAATGCTT
TAAAATAAAAATAAAAAGAATCCTTTTGATAAATT
TAAAATGTTACTTATTTTAAAATAAATGAAGTGAG
ATGGCATGGTGAGGTGAAAGTATCACTGGACTAGG
AAGAAGGTGACTTAGGTTCTAGATAGGTGTCTTTT
AGGACTCTGATTTTGAGGAGATCACTTACTATCCA
TTTCTTCATGTTAAAAGAAGTCATCTCAAACTCTT
AGTTTTTTTTTTTTACAACTATGTAATTTATATTC
CATTTACATAAGGATAGACTTATTTGTCAAGCTCA
GCACAATCTGTAAATTTTTAACCTATGTTACACCA
TCTTCAGTGCCAGTCTTGGGCAAAATTGTGCAAGA
GGTGAAGTTTATATTTGAATATCCATTCTCGTTTT
AGGACTCTTCTTCCATATTAGTGTCATCTTGCCTC
CCTACCTTCCACATGCCCCATGACTTGATGCAGTT
TTAATACTTGTAATTCCCCTAACCATAAGATTTAC
TGCTGCTGTGGATATCTCCATGAAGTTTTCCCACT
GAGTCACATCAGAAATGCCCTACATCTTATTTCCT
CAGGGCTCAAGAGAATCTGACAGATACCATAAAGG
GATTTGACCTAATCACTAATTTTCAGGTGGTGGCT
GATGCTTTGAACATCTCTTTGCTGCCCAATCCATT
AGCGACAGTAGGATTTTTCAAACCTGGTATGAATA
GACAGAACCCTATCCAGTGGAAGGAGAATTTAATA
AAGATAGTGCTGAAAGAATTCCTTAGGTAATCTAT
AACTAGGACTACTCCTGGTAACAGTAATACATTCC
ATTGTTTTAGTAACCAGAAATCTTCATGCAATGAA
AAATACTTTAATTCATGAAGCTTACTTTTTTTTTT
TGGTGTCAGAGTCTCGCTCTTGTCACCCAGGCTGG
AATGCAGTGGCGCCATCTCAGCTCACTGCAACCTC
CATCTCCCAGGTTCAAGCGATTCTCGTGCCTCGGC
CTCCTGAGTAGCTGGGATTACAGGCGTGTGCCACT
ACACTCAACTAATTTTTGTATTTTTAGGAGAGACG
GGGTTTCACCCTGTTGGCCAGGCTGGTCTCGAACT
CCTGACCTCAAGTGATTCACCCACCTTGGCCTCAT
AAACCTGTTTTGCAGAACTCATTTATTCAGCAAAT
ATTTATTGAGTGCCTACCAGATGCCAGTCACCGCA
CAAGGCACTGGGTATATGGTATCCCCAAACAAGAG
ACATAATCCCGGTCCTTAGGTAGTGCTAGTGTGGT
CTGTAATATCTTACTAAGGCCTTTGGTATACGACC
CAGAGATAACACGATGCGTATTTTAGTTTTGCAAA
GAAGGGGTTTGGTCTCTGTGCCAGCTCTATAATTG
TTTTGCTACGATTCCACTGAAACTCTTCGATCAAG
CTACTTTATGTAAATCACTTCATTGTTTTAAAGGA
ATAAACTTGATTATATTGTTTTTTTATTTGGCATA
ACTGTGATTCTTTTAGGAGAATTACTGTAGACATT
AAGGTGTATGTCAGATATTCATATTGACCCAAATG
TGTAATATTCCAGTTTTCTCTGCATAAGTAATTAA
AATATACTTAAAAATTAATAGTTTTATCTGGGTAG
AAATAAACAGGTGCCTGAACTAGTTCACAGACAAG
GAAACTTCTATGTAAAAATCACTATGATTTCTGAA
TTGCTATGTGAAACTACAGATCTTTGGAAGACTGT
TTAGGTAGGGTGTTAAGACTTACACAGTACCTCGT
TTCTACACAGAGAAAGAAATGGCCATACTTCAGGA
ACTGCAGTGCTTATGAGGGGATATTTAGGCCTCTT
GAATTTTTGATGTAGATGGGCATTTTTTTAAGGTA
GTGGTTAATTACCTTTATGTGAACTTTGAATGGTT
TAACAAAAGATTTGTTTTTGTAGAGATTTTAAAGG
GGGAGAATTCTAGAAATAAATGTTACCTAATTATT
ACAGCCTTAAAGACAAAAATCCTTGTTGAAGTTTT
TTTAAAAAAAGCTAAATTAGATAGACTTAGGCATT
AAGATGTTTGTGGAAGAATATAGCAGACGTATATT
GTATCATTTGAGTGAATGTTCCCAAGTAGGCATTC
TAGGCTCTATTTAACTGAGTCACACTGCATAGGAA
TTTAGAACCTAACTTTTATAGGTTATCAAAACTGT
TGTCACCATTGCACAATTTTGTCCTAATATATACA
TAGAAACTTTGTGGGGCATGTTAAGTTACAGTTTG
CACAAGTTCATCTCATTTGTATTCCATTGATTTTT
TTTTTCTTCTAAACATTTTTTCTTCAAACAGTATA
TAACTTTTTTTAGGGGATTTTTTTTTAGACAGCAA
AAACTATCTGAAGATTTCCATTTGTCAAAAAGTAA
TGATTTCTTGATAATTGTGTAGTAATGTTTTTTAG
AACCCAGCAGTTACCTTAAAGCTGAATTTATATTT
AGTAACTTCTGTGTTAATACTGGATAGCATGAATT
CTGCATTGAGAAACTGAATAGCTGTCATAAAATGA
AACTTTCTTTCTAAAGAAAGATACTCACATGAGTT
CTTGAAGAATAGTCATAACTAGATTAAGATCTGTG
TTTTAGTTTAATAGTTTGAAGTGCCTGTTTGGGAT
AATGATAGGTAATTTAGATGAATTTAGGGGAAAAA
AAAGTTATCTGCAGATATGTTGAGGGCCCATCTCT
CCCCCCACACCCCCACAGAGCTAACTGGGTTACAG
TGTTTTATCCGAAAGTTTCCAATTCCACTGTCTTG
TGTTTTCATGTTGAAAATACTTTTGCATTTTTCCT
TTGAGTGCCAATTTCTTACTAGTACTATTTCTTAA
TGTAACATGTTTACCTGGAATGTATTTTAACTATT
TTTGTATAGTGTAAACTGAAACATGCACATTTTGT
ACATTGTGCTTTCTTTTGTGGGACATATGCAGTGT
GATCCAGTTGTTTTCCATCATTTGGTTGCGCTGAC
CTAGGAATGTTGGTCATATCAAACATTAAAAATGA
CCACTCTTTTAATTGAAATTAACTTTTAAATGTTT
ATAGGAGTATGTGCTGTGAAGTGATCTAAAATTTG
TAATATTTTTGTCATGAACTGTACTACTCCTAATT
ATTGTAATGTAATAAAAATAGTTACAGTGACAAAA
AAAAAAAAAAA

The underlined sequences above correspond to KRAS RNA sequences targeted by exemplified KRAS-355 and KRAS-940 DsiRNA agents of the invention. Known SNPs within the above cDNA sequence include an A/T polymorphism at position 364 (dbSNP Accession No. rs17851045); a T/C polymorphism at position 824 (dbSNP Accession No. rs1137282); and a KRAS G12V mutant G/T polymorphism at position 216, as previously described in US 2005/0176045. These three polymorphic sites are shown in bold italics.

Wild-typeKRAS Amino Acid Sequence NP_203524.1
(SEQ ID NO: 2; translation of NM_033360):
[sequence omitted]
Wild-typeKRAS sequence (SEQ ID NO: 3;
K-Ras4b-transcript variant b;
GenBank Accession No. NM_004985.3):
GGCCGCGGCGGCGGAGGCAGCAGCGGCGGCGGCAG
TGGCGGCGGCGAAGGTGGCGGCGGCTCGGCCAGTA
CTCCCGGCCCCCGCCATTTCGGACTGGGAGCGAGC
GCGGCGCAGGCACTGAAGGCGGCGGCGGGGCCAGA
GGCTCAGCGGCTCCCAGGTGCGGGAGAGAGGCCTG
CTGAAAATGACTGAATATAAACTTGTGGTAGTTGG
AGCTG [symbol] TGGCGTAGGCAAGAGTGCCTTGACGATAC
AGCTAATTCAGAATCATTTTGTGGACGAATATGAT
CCAACAATAGAGGATTCCTACAGGAAGCAAGTAGT
AATTGATGGAGAAACCTGTCTCTTGGATATTCTCG
ACACAGCAGGTCA [symbol] GAGGAGTACAGTGCAATGAGG
GACCAGTACATGAGGACTGGGGAGGGCTTTCTTTG
TGTATTTGCCATAAATAATACTAAATCATTTGAAG
ATATTCACCATTATAGAGAACAAATTAAAAGAGTT
AAGGACTCTGAAGATGTACCTATGGTCCTAGTAGG
AAATAAATGTGATTTGCCTTCTAGAACAGTAGACA
CAAAACAGGCTCAGGACTTAGCAAGAAGTTATGGA
ATTCCTTTTATTGAAACATCAGCAAAGACAAGACA
GGGTGTTGA [symbol] GATGCCTTCTATACATTAGTTCGAG
AAATTCGAAAACATAAAGAAAAGATGAGCAAAGAT
GGTAAAAAGAAGAAAAAGAAGTCAAAGACAAAGTG
TGTAATTATGTAAATACAATTTGTACTTTTTTCTT
AAGGCATACTAGTACAAGTGGTAATTTTTGTACAT
TACACTAAATTATTAGCATTTGTTTTAGCATTACC
TAATTTTTTTCCTGCTCCATGCAGACTGTTAGCTT
TTACCTTAAATGCTTATTTTAAAATGACAGTGGAA
GTTTTTTTTTCCTCTAAGTGCCAGTATTCCCAGAG
TTTTGGTTTTTGAACTAGCAATGCCTGTGAAAAAG
AAACTGAATACCTAAGATTTCTGTCTTGGGGTTTT
TGGTGCATGCAGTTGATTACTTCTTATTTTTCTTA
CCAATTGTGAATGTTGGTGTGAAACAAATTAATGA
AGCTTTTGAATCATCCCTATTCTGTGTTTTATCTA
GTCACATAAATGGATTAATTACTAATTTCAGTTGA
GACCTTCTAATTGGTTTTTACTGAAACATTGAGGG
AACACAAATTTATGGGCTTCCTGATGATGATTCTT
CTAGGCATCATGTCCTATAGTTTGTCATCCCTGAT
GAATGTAAAGTTACACTGTTCACAAAGGTTTTGTC
TCCTTTCCACTGCTATTAGTCATGGTCACTCTCCC
CAAAATATTATATTTTTTCTATAAAAAGAAAAAAA
TGGAAAAAAATTACAAGGCAATGGAAACTATTATA
AGGCCATTTCCTTTTCACATTAGATAAATTACTAT
AAAGACTCCTAATAGCTTTTCCTGTTAAGGCAGAC
CCAGTATGAAATGGGGATTATTATAGCAACCATTT
TGGGGCTATATTTACATGCTACTAAATTTTTATAA
TAATTGAAAAGATTTTAACAAGTATAAAAAATTCT
CATAGGAATTAAATGTAGTCTCCCTGTGTCAGACT
GCTCTTTCATAGTATAACTTTAAATCTTTTCTTCA
ACTTGAGTCTTTGAAGATAGTTTTAATTCTGCTTG
TGACATTAAAAGATTATTTGGGCCAGTTATAGCTT
ATTAGGTGTTGAAGAGACCAAGGTTGCAAGGCCAG
GCCCTGTGTGAACCTTTGAGCTTTCATAGAGAGTT
TCACAGCATGGACTGTGTCCCCACGGTCATCCAGT
GTTGTCATGCATTGGTTAGTCAAAATGGGGAGGGA
CTAGGGCAGTTTGGATAGCTCAACAAGATACAATC
TCACTCTGTGGTGGTCCTGCTGACAAATCAAGAGC
ATTGCTTTTGTTTCTTAAGAAAACAAACTCTTTTT
TAAAAATTACTTTTAAATATTAACTCAAAAGTTGA
GATTTTGGGGTGGTGGTGTGCCAAGACATTAATTT
TTTTTTTAAACAATGAAGTGAAAAAGTTTTACAAT
CTCTAGGTTTGGCTAGTTCTCTTAACACTGGTTAA
ATTAACATTGCATAAACACTTTTCAAGTCTGATCC
ATATTTAATAATGCTTTAAAATAAAAATAAAAACA
ATCCTTTTGATAAATTTAAAATGTTACTTATTTTA
AAATAAATGAAGTGAGATGGCATGGTGAGGTGAAA
GTATCACTGGACTAGGAAGAAGGTGACTTAGGTTC
TAGATAGGTGTCTTTTAGGACTCTGATTTTGAGGA
CATCACTTACTATCCATTTCTTCATGTTAAAAGAA
GTCATCTCAAACTCTTAGTTTTTTTTTTTTACAAC
TATGTAATTTATATTCCATTTACATAAGGATACAC
TTATTTGTCAAGCTCAGCACAATCTGTAAATTTTT
AACCTATGTTACACCATCTTCAGTGCCAGTCTTGG
GCAAAATTGTGCAAGAGGTGAAGTTTATATTTGAA
TATCCATTCTCGTTTTAGGACTCTTCTTCCATATT
AGTGTCATCTTGCCTCCCTACCTTCCACATGCCCC
ATGACTTGATGCAGTTTTAATACTTGTAATTCCCC
TAACCATAAGATTTACTGCTGCTGTGGATATCTCC
ATGAAGTTTTCCCACTGAGTCACATCAGAAATGCC
CTACATCTTATTTCCTCAGGGCTCAAGAGAATCTG
ACAGATACCATAAAGGGATTTGACCTAATCACTAA
TTTTCAGGTGGTGGCTGATGCTTTGAACATCTCTT
TGCTGCCCAATCCATTAGCGACAGTAGGATTTTTC
AAACCTGGTATGAATAGACAGAACCCTATCCAGTG
GAAGGAGAATTTAATAAAGATAGTGCTGAAAGAAT
TCCTTAGGTAATCTATAACTAGGACTACTCCTGGT
AACAGTAATACATTCCATTGTTTTAGTAACCAGAA
ATCTTCATGCAATGAAAAATACTTTAATTCATGAA
GCTTACTTTTTTTTTTTGGTGTCAGAGTCTCGCTC
TTGTCACCCAGGCTGGAATGCAGTGGCGCCATCTC
AGCTCACTGCAACCTCCATCTCCCAGGTTCAAGCG
ATTCTCGTGCCTCGGCCTCCTGAGTAGCTGGGATT
ACAGGCGTGTGCCACTACACTCAACTAATTTTTGT
ATTTTTAGGAGAGACGGGGTTTCACCCTGTTGGCC
AGGCTGGTCTCGAACTCCTGACCTCAAGTGATTCA
CCCACCTTGGCCTCATAAACCTGTTTTGCAGAACT
CATTTATTCAGCAAATATTTATTGAGTGCCTACCA
GATGCCAGTCACCGCACAAGGCACTGGGTATATGG
TATCCCCAAACAAGAGACATAATCCCGGTCCTTAG
GTAGTGCTAGTGTGGTCTGTAATATCTTACTAAGG
CCTTTGGTATACGACCCAGAGATAACACGATGCGT
ATTTTAGTTTTGCAAAGAAGGGGTTTGGTCTCTGT
GCCAGCTCTATAATTGTTTTGCTACGATTCCACTG
AAACTCTTCGATCAAGCTACTTTATGTAAATCACT
TCATTGTTTTAAAGGAATAAACTTGATTATATTGT
TTTTTTATTTGGCATAACTGTGATTCTTTTAGGAC
AATTACTGTACACATTAAGGTGTATGTCAGATATT
CATATTGACCCAAATGTGTAATATTCCAGTTTTCT
CTGCATAAGTAATTAAAATATACTTAAAAATTAAT
AGTTTTATCTGGGTACAAATAAACAGGTGCCTGAA
CTAGTTCACAGACAAGGAAACTTCTATGTAAAAAT
CACTATGATTTCTGAATTGCTATGTGAAACTACAG
ATCTTTGGAACACTGTTTAGGTAGGGTGTTAAGAC
TTACACAGTACCTCGTTTCTACACAGAGAAAGAAA
TGGCCATACTTCAGGAACTGCAGTGCTTATGAGGG
GATATTTAGGCCTCTTGAATTTTTGATGTAGATGG
GCATTTTTTTAAGGTAGTGGTTAATTACCTTTATG
TGAACTTTGAATGGTTTAACAAAAGATTTGTTTTT
GTAGAGATTTTAAAGGGGGAGAATTCTAGAAATAA
ATGTTACCTAATTATTACAGCCTTAAAGACAAAAA
TCCTTGTTGAAGTTTTTTTAAAAAAAGCTAAATTA
CATAGACTTAGGCATTAACATGTTTGTGGAAGAAT
ATAGCAGACGTATATTGTATCATTTGAGTGAATGT
TCCCAAGTAGGCATTCTAGGCTCTATTTAACTGAG
TCACACTGCATAGGAATTTAGAACCTAACTTTTAT
AGGTTATCAAAACTGTTGTCACCATTGCACAATTT
TGTCCTAATATATACATAGAAACTTTGTGGGGCAT
GTTAAGTTACAGTTTGCACAAGTTCATCTCATTTG
TATTCCATTGATTTTTTTTTTCTTCTAAACATTTT
TTCTTCAAACAGTATATAACTTTTTTTAGGGGATT
TTTTTTTAGACAGCAAAAACTATCTGAAGATTTCC
ATTTGTCAAAAAGTAATGATTTCTTGATAATTGTG
TAGTAATGTTTTTTAGAACCCAGCAGTTACCTTAA
AGCTGAATTTATATTTAGTAACTTCTGTGTTAATA
CTGGATAGCATGAATTCTGCATTGAGAAACTGAAT
AGCTGTCATAAAATGAAACTTTCTTTCTAAAGAAA
GATACTCACATGAGTTCTTGAAGAATAGTCATAAC
TAGATTAAGATCTGTGTTTTAGTTTAATAGTTTGA
AGTGCCTGTTTGGGATAATGATAGGTAATTTAGAT
GAATTTAGGGGAAAAAAAAGTTATCTGCAGATATG
TTGAGGGCCCATCTCTCCCCCCACACCCCCACAGA
GCTAACTGGGTTACAGTGTTTTATCCGAAAGTTTC
CAATTCCACTGTCTTGTGTTTTCATGTTGAAAATA
CTTTTGCATTTTTCCTTTGAGTGCCAATTTCTTAC
TAGTACTATTTCTTAATGTAACATGTTTACCTGGA
ATGTATTTTAACTATTTTTGTATAGTGTAAACTGA
AACATGCACATTTTGTACATTGTGCTTTCTTTTGT
GGGACATATGCAGTGTGATCCAGTTGTTTTCCATC
ATTTGGTTGCGCTGACCTAGGAATGTTGGTCATAT
CAAACATTAAAAATGACCACTCTTTTAATTGAAAT
TAACTTTTAAATGTTTATAGGAGTATGTGCTGTGA
AGTGATCTAAAATTTGTAATATTTTTGTCATGAAC
TGTACTACTCCTAATTATTGTAATGTAATAAAAAT
AGTTACAGTGACAAAAAAAAAAAAAAA

The underlined sequences above correspond to KRAS RNA sequences targeted by exemplified KRAS-355 and KRAS-940 DsiRNA agents of the invention. Known SNPs within the above cDNA sequence include an A/T polymorphism at position 364 (dbSNP Accession No. rs17851045); a T/C polymorphism at position 700 (dbSNP Accession No. rs1137282); and a KRAS G12V mutant G/T polymorphism at position 216, as previously described in US 2005/0176045. These three polymorphic sites are shown in bold italics.

Wild-typeKRAS Amino Acid Sequence
NP_004976.2 (SEQ ID NO: 4;
translation of NM_004985):
MTEYKLVVVGAGGVGKSALTIQLIQNHFVDEYDPTIEDSYRKQVV
IDGETCLLDILDTAGQEEYSAMRDQYMRTGEGFLCVFAINNTKSF
EDIHHYREQIKRVKDSEDVPMVLVGNKCDLPSRTVDTKQAQDLAR
SYGIPFIETSAKTRQGVDDAFYTLVREIRKHKEKMSKDGKKKKKK
SKTKCVIM

### In Vitro Assay to Assess DsiRNA KRAS Inhibitory Activity

[0246] An in vitro assay that recapitulates RNAi in a cell-free system can be used to evaluate DsiRNA constructs targeting KRAS RNA sequence(s), and thus to assess KRAS-specific gene inhibitory activity (also referred to herein as KRAS inhibitory activity) of a DsiRNA. The assay comprises the system described by Tuschl et al., 1999, Genes and Development, 13, 3191-3197 and Zamore et al., 2000, Cell, 101, 25-33 adapted for use with DsiRNA agents directed against KRAS RNA. A Drosophila extract derived from syncytial blastoderm is used to reconstitute RNAi activity in vitro. Target RNA is generated via in vitro transcription from an appropriate KRAS expressing plasmid using T7 RNA polymerase or via chemical synthesis. Sense and antisense DsiRNA strands (for example 20 uM each) are annealed by incubation in buffer (such as 100 mM potassium acetate, 30 mM HEPES-KOH, pH 7.4, 2 mM magnesium acetate) for 1 minute at 90° C. followed by 1 hour at 37° C., then diluted in lysis buffer (for example 100 mM potassium acetate, 30 mM HEPES-KOH at pH 7.4, 2 mM magnesium acetate). Annealing can be monitored by gel electrophoresis on an agarose gel in TBE buffer and stained with ethidium bromide. The Drosophila lysate is prepared using zero to two-hour-old embryos from Oregon R flies collected on yeasted molasses agar that are dichlorinated and lysed. The lysate is centrifuged and the supernatant isolated. The assay comprises a reaction mixture containing 50% lysate [vol/vol], RNA (10-50 pM final concentration), and 10% [vol/vol] lysis buffer containing DsiRNA (10 nM final concentration). The reaction mixture also contains 10 mM creatine phosphate, 10 ug/ml creatine phosphokinase, 100 um GTP, 100 uM UTP, 100 uM CTP, 500 uM ATP, 5 mM DTT, 0.1 U/uL RNasin (Promega), and 100 uM of each amino acid. The final concentration of potassium acetate is adjusted to 100 mM. The reactions are pre-assembled on ice and preincubated at 25° C. for 10 minutes before adding RNA, then incubated at 25° C. for an additional 60 minutes. Reactions are quenched with 4 volumes of 1.25× Passive Lysis Buffer (Promega). Target RNA cleavage is assayed by RT-PCR analysis or other methods known in the art and are compared to control reactions in which DsiRNA is omitted from the reaction.

[0247] Alternately, internally-labeled target RNA for the assay is prepared by in vitro transcription in the presence of [alpha-³²P] CTP, passed over a G50 Sephadex column by spin chromatography and used as target RNA without further purification. Optionally, target RNA is 5′-³²P-end labeled using T4 polynucleotide kinase enzyme. Assays are performed as described above and target RNA and the specific RNA cleavage products generated by RNAi are visualized on an autoradiograph of a gel. The percentage of cleavage is determined by PHOSPHOR IMAGER® (autoradiography) quantitation of bands representing intact control RNA or RNA from control reactions without DsiRNA and the cleavage products generated by the assay.

[0248] In one embodiment, this assay is used to determine target sites in the KRAS RNA target for DsiRNA mediated RNAi cleavage, wherein a plurality of DsiRNA constructs are screened for RNAi mediated cleavage of the KRAS RNA target, for example, by analyzing the assay reaction by electrophoresis of labeled target RNA, or by northern blotting, as well as by other methodology well known in the art.

[0249] In certain embodiments, a DsiRNA of the invention is deemed to possess KRAS inhibitory activity if, e.g., a 50% reduction in KRAS RNA levels is observed in a system, cell, tissue or organism, relative to a suitable control. Additional metes and bounds for determination of KRAS inhibitory activity of a DsiRNA of the invention are described supra.

### Conjugation and Delivery of Anti-KRAS DsiRNA Agents

[0250] In certain embodiments the present invention relates to a method for treating a subject having a KRAS-associated disease or disorder, or at risk of developing a KRAS-associated disease or disorder. In such embodiments, the DsiRNA can act as novel therapeutic agents for controlling the KRAS-associated disease or disorder. The method comprises administering a pharmaceutical composition of the invention to the patient (e.g., human), such that the expression, level and/or activity of a KRAS RNA is reduced. The expression, level and/or activity of a polypeptide encoded by a KRAS RNA might also be reduced by a DsiRNA of the instant invention, even where said DsiRNA is directed against a non-coding region of the KRAS transcript (e.g., a targeted 5′ UTR or 3′ UTR sequence). Because of their high specificity, the DsiRNAs of the present invention can specifically target KRAS sequences of cells and tissues, optionally in an allele-specific manner where polymorphic alleles exist within an individual and/or population.

[0251] In the treatment of a KRAS-associated disease or disorder, the DsiRNA can be brought into contact with the cells or tissue of a subject, e.g., the cells or tissue of a subject exhibiting disregulation of KRAS and/or otherwise targeted for reduction of KRAS levels. For example, DsiRNA substantially identical to all or part of a KRAS RNA sequence, may be brought into contact with or introduced into such a cell, either in vivo or in vitro. Similarly, DsiRNA substantially identical to all or part of a KRAS RNA sequence may administered directly to a subject having or at risk of developing a KRAS-associated disease or disorder.

[0252] Therapeutic use of the DsiRNA agents of the instant invention can involve use of formulations of DsiRNA agents comprising multiple different DsiRNA agent sequences. For example, two or more, three or more, four or more, five or more, etc. of the presently described agents can be combined to produce a formulation that, e.g., targets multiple different regions of the KRAS RNA, or that not only target KRAS RNA but also target, e.g., cellular target genes associated with a KRAS-associated disease or disorder. A DsiRNA agent of the instant invention may also be constructed such that either strand of the DsiRNA agent independently targets two or more regions of KRAS RNA, or such that one of the strands of the DsiRNA agent targets a cellular target gene of KRAS known in the art.

[0253] Use of multifunctional DsiRNA molecules that target more then one region of a target nucleic acid molecule can also provide potent inhibition of KRAS RNA levels and expression. For example, a single multifunctional DsiRNA construct of the invention can target both the KRAS-355 and KRAS-940 sites simultaneously; additionally and/or alternatively, single or multifunctional agents of the invention can be designed to selectively target one splice variant of KRAS over another.

[0254] Thus, the DsiRNA agents of the instant invention, individually, or in combination or in conjunction with other drugs, can be used to treat, inhibit, reduce, or prevent a KRAS-associated disease or disorder. For example, the DsiRNA molecules can be administered to a subject or can be administered to other appropriate cells evident to those skilled in the art, individually or in combination with one or more drugs under conditions suitable for the treatment.

[0255] The DsiRNA molecules also can be used in combination with other known treatments to treat, inhibit, reduce, or prevent a KRAS-associated disease or disorder in a subject or organism. For example, the described molecules could be used in combination with one or more known compounds, treatments, or procedures to treat, inhibit, reduce, or prevent a KRAS-associated disease or disorder in a subject or organism as are known in the art.

[0256] A DsiRNA agent of the invention can be conjugated (e.g., at its 5′ or 3′ terminus of its sense or antisense strand) or unconjugated to another moiety (e.g. a non-nucleic acid moiety such as a peptide), an organic compound (e.g., a dye, cholesterol, or the like). Modifying DsiRNA agents in this way may improve cellular uptake or enhance cellular targeting activities of the resulting DsiRNA agent derivative as compared to the corresponding unconjugated DsiRNA agent, are useful for tracing the DsiRNA agent derivative in the cell, or improve the stability of the DsiRNA agent derivative compared to the corresponding unconjugated DsiRNA agent.

### Methods of Introducing Nucleic Acids, Vectors, and Host Cells

[0257] DsiRNA agents of the invention may be directly introduced into a cell (i.e., intracellularly); or introduced extracellularly into a cavity, interstitial space, into the circulation of an organism, introduced orally, or may be introduced by bathing a cell or organism in a solution containing the nucleic acid. Vascular or extravascular circulation, the blood or lymph system, and the cerebrospinal fluid are sites where the nucleic acid may be introduced.

[0258] The DsiRNA agents of the invention can be introduced using nucleic acid delivery methods known in art including injection of a solution containing the nucleic acid, bombardment by particles covered by the nucleic acid, soaking the cell or organism in a solution of the nucleic acid, or electroporation of cell membranes in the presence of the nucleic acid. Other methods known in the art for introducing nucleic acids to cells may be used, such as lipid-mediated carrier transport, chemical-mediated transport, and cationic liposome transfection such as calcium phosphate, and the like. The nucleic acid may be introduced along with other components that perform one or more of the following activities: enhance nucleic acid uptake by the cell or otherwise increase inhibition of the target KRAS RNA.

[0259] A cell having a target KRAS RNA may be from the germ line or somatic, totipotent or pluripotent, dividing or non-dividing, parenchyma or epithelium, immortalized or transformed, or the like. The cell may be a stem cell or a differentiated cell. Cell types that are differentiated include adipocytes, fibroblasts, myocytes, cardiomyocytes, endothelium, neurons, glia, blood cells, megakaryocytes, lymphocytes, macrophages, neutrophils, eosinophils, basophils, mast cells, leukocytes, granulocytes, keratinocytes, chondrocytes, osteoblasts, osteoclasts, hepatocytes, and cells of the endocrine or exocrine glands.

[0260] Depending on the particular target KRAS RNA sequence and the dose of DsiRNA agent material delivered, this process may provide partial or complete loss of function for the KRAS RNA. A reduction or loss of RNA levels or expression (either KRAS RNA expression or encoded polypeptide expression) in at least 50%, 60%, 70%, 80%, 90%, 95% or 99% or more of targeted cells is exemplary. Inhibition of KRAS RNA levels or expression refers to the absence (or observable decrease) in the level of KRAS RNA or KRAS RNA-encoded protein. Specificity refers to the ability to inhibit the KRAS RNA without manifest effects on other genes of the cell. The consequences of inhibition can be confirmed by examination of the outward properties of the cell or organism or by biochemical techniques such as RNA solution hybridization, nuclease protection, Northern hybridization, reverse transcription, gene expression monitoring with a microarray, antibody binding, enzyme linked immunosorbent assay (ELISA), Western blotting, radioimmunoassay (RIA), other immunoassays, and fluorescence activated cell analysis (FACS). Inhibition of target KRAS RNA sequence(s) by the DsiRNA agents of the invention also can be measured based upon the effect of administration of such DsiRNA agents upon development/progression of a KRAS-associated disease or disorder, e.g., tumor formation, growth, metastasis, etc., either in vivo or in vitro. Treatment and/or reductions in tumor or cancer cell levels can include halting or reduction of growth of tumor or cancer cell levels or reductions of, e.g., 10%, 20%, 30%, 40%, 50%, 60%, 70%, 80%, 90%, 95% or 99% or more, and can also be measured in logarithmic terms, e.g., 10-fold, 100-fold, 1000-fold, 10⁵-fold, 10⁶-fold, 10⁷-fold reduction in cancer cell levels could be achieved via administration of the DsiRNA agents of the invention to cells, a tissue, or a subject.

[0261] For RNA-mediated inhibition in a cell line or whole organism, expression a reporter or drug resistance gene whose protein product is easily assayed can be measured. Such reporter genes include acetohydroxyacid synthase (AHAS), alkaline phosphatase (AP), beta galactosidase (LacZ), beta glucuronidase (GUS), chloramphenicol acetyltransferase (CAT), green fluorescent protein (GFP), horseradish peroxidase (HRP), luciferase (Luc), nopaline synthase (NOS), octopine synthase (OCS), and derivatives thereof. Multiple selectable markers are available that confer resistance to ampicillin, bleomycin, chloramphenicol, gentamycin, hygromycin, kanamycin, lincomycin, methotrexate, phosphinothricin, puromycin, and tetracyclin. Depending on the assay, quantitation of the amount of gene expression allows one to determine a degree of inhibition which is greater than 10%, 33%, 50%, 90%, 95% or 99% as compared to a cell not treated according to the present invention.

[0262] Lower doses of injected material and longer times after administration of RNA silencing agent may result in inhibition in a smaller fraction of cells (e.g., at least 10%, 20%, 50%, 75%, 90%, or 95% of targeted cells). Quantitation of gene expression in a cell may show similar amounts of inhibition at the level of accumulation of target KRAS RNA or translation of target protein. As an example, the efficiency of inhibition may be determined by assessing the amount of gene product in the cell; RNA may be detected with a hybridization probe having a nucleotide sequence outside the region used for the inhibitory DsiRNA, or translated polypeptide may be detected with an antibody raised against the polypeptide sequence of that region.

[0263] The DsiRNA agent may be introduced in an amount which allows delivery of at least one copy per cell. Higher doses (e.g., at least 5, 10, 100, 500 or 1000 copies per cell) of material may yield more effective inhibition; lower doses may also be useful for specific applications.

### Pharmaceutical Compositions

[0264] In certain embodiments, the present invention provides for a pharmaceutical composition comprising the DsiRNA agent of the present invention. The DsiRNA agent sample can be suitably formulated and introduced into the environment of the cell by any means that allows for a sufficient portion of the sample to enter the cell to induce gene silencing, if it is to occur. Many formulations for dsRNA are known in the art and can be used so long as the dsRNA gains entry to the target cells so that it can act. See, e.g., U.S. published patent application Nos. 2004/0203145 A1 and 2005/0054598 A1. For example, the DsiRNA agent of the instant invention can be formulated in buffer solutions such as phosphate buffered saline solutions, liposomes, micellar structures, and capsids. Formulations of DsiRNA agent with cationic lipids can be used to facilitate transfection of the DsiRNA agent into cells. For example, cationic lipids, such as lipofectin (U.S. Pat. No. 5,705,188), cationic glycerol derivatives, and polycationic molecules, such as polylysine (published PCT International Application WO 97/30731), can be used. Suitable lipids include Oligofectamine, Lipofectamine (Life Technologies), NC388 (Ribozyme Pharmaceuticals, Inc., Boulder, Colo.), or FuGene 6 (Roche) all of which can be used according to the manufacturer's instructions.

[0265] Such compositions typically include the nucleic acid molecule and a pharmaceutically acceptable carrier. As used herein the language “pharmaceutically acceptable carrier” includes saline, solvents, dispersion media, coatings, antibacterial and antifungal agents, isotonic and absorption delaying agents, and the like, compatible with pharmaceutical administration. Supplementary active compounds can also be incorporated into the compositions.

[0266] A pharmaceutical composition is formulated to be compatible with its intended route of administration. Examples of routes of administration include parenteral, e.g., intravenous, intradermal, subcutaneous, oral (e.g., inhalation), transdermal (topical), transmucosal, and rectal administration. Solutions or suspensions used for parenteral, intradermal, or subcutaneous application can include the following components: a sterile diluent such as water for injection, saline solution, fixed oils, polyethylene glycols, glycerine, propylene glycol or other synthetic solvents; antibacterial agents such as benzyl alcohol or methyl parabens; antioxidants such as ascorbic acid or sodium bisulfite; chelating agents such as ethylenediaminetetraacetic acid; buffers such as acetates, citrates or phosphates and agents for the adjustment of tonicity such as sodium chloride or dextrose. pH can be adjusted with acids or bases, such as hydrochloric acid or sodium hydroxide. The parenteral preparation can be enclosed in ampoules, disposable syringes or multiple dose vials made of glass or plastic.

[0267] Pharmaceutical compositions suitable for injectable use include sterile aqueous solutions (where water soluble) or dispersions and sterile powders for the extemporaneous preparation of sterile injectable solutions or dispersion. For intravenous administration, suitable carriers include physiological saline, bacteriostatic water, Cremophor EL™ (BASF, Parsippany, N.J.) or phosphate buffered saline (PBS). In all cases, the composition must be sterile and should be fluid to the extent that easy syringability exists. It should be stable under the conditions of manufacture and storage and must be preserved against the contaminating action of microorganisms such as bacteria and fungi. The carrier can be a solvent or dispersion medium containing, for example, water, ethanol, polyol (for example, glycerol, propylene glycol, and liquid polyethylene glycol, and the like), and suitable mixtures thereof. The proper fluidity can be maintained, for example, by the use of a coating such as lecithin, by the maintenance of the required particle size in the case of dispersion and by the use of surfactants. Prevention of the action of microorganisms can be achieved by various antibacterial and antifungal agents, for example, parabens, chlorobutanol, phenol, ascorbic acid, thimerosal, and the like. In many cases, it will be preferable to include isotonic agents, for example, sugars, polyalcohols such as manitol, sorbitol, sodium chloride in the composition. Prolonged absorption of the injectable compositions can be brought about by including in the composition an agent which delays absorption, for example, aluminum monostearate and gelatin.

[0268] Sterile injectable solutions can be prepared by incorporating the active compound in the required amount in an appropriate solvent with one or a combination of ingredients enumerated above, as required, followed by filtered sterilization. Generally, dispersions are prepared by incorporating the active compound into a sterile vehicle, which contains a basic dispersion medium and the required other ingredients from those enumerated above. In the case of sterile powders for the preparation of sterile injectable solutions, the preferred methods of preparation are vacuum drying and freeze-drying which yields a powder of the active ingredient plus any additional desired ingredient from a previously sterile-filtered solution thereof.

[0269] Oral compositions generally include an inert diluent or an edible carrier. For the purpose of oral therapeutic administration, the active compound can be incorporated with excipients and used in the form of tablets, troches, or capsules, e.g., gelatin capsules. Oral compositions can also be prepared using a fluid carrier for use as a mouthwash. Pharmaceutically compatible binding agents, and/or adjuvant materials can be included as part of the composition. The tablets, pills, capsules, troches and the like can contain any of the following ingredients, or compounds of a similar nature: a binder such as microcrystalline cellulose, gum tragacanth or gelatin; an excipient such as starch or lactose, a disintegrating agent such as alginic acid, Primogel, or corn starch; a lubricant such as magnesium stearate or Sterotes; a glidant such as colloidal silicon dioxide; a sweetening agent such as sucrose or saccharin; or a flavoring agent such as peppermint, methyl salicylate, or orange flavoring.

[0270] For administration by inhalation, the compounds are delivered in the form of an aerosol spray from pressured container or dispenser which contains a suitable propellant, e.g., a gas such as carbon dioxide, or a nebulizer. Such methods include those described in U.S. Pat. No. 6,468,798.

[0271] Systemic administration can also be by transmucosal or transdermal means. For transmucosal or transdermal administration, penetrants appropriate to the barrier to be permeated are used in the formulation. Such penetrants are generally known in the art, and include, for example, for transmucosal administration, detergents, bile salts, and fusidic acid derivatives. Transmucosal administration can be accomplished through the use of nasal sprays or suppositories. For transdermal administration, the active compounds are formulated into ointments, salves, gels, or creams as generally known in the art.

[0272] The compounds can also be prepared in the form of suppositories (e.g., with conventional suppository bases such as cocoa butter and other glycerides) or retention enemas for rectal delivery.

[0273] The compounds can also be administered by transfection or infection using methods known in the art, including but not limited to the methods described in McCaffrey et al. (2002), Nature, 418(6893), 38-9 (hydrodynamic transfection); Xia et al. (2002), Nature Biotechnol., 20(10), 1006-10 (viral-mediated delivery); or Putnam (1996), Am. J. Health Syst. Pharm. 53(2), 151-160, erratum at Am. J. Health Syst. Pharm. 53(3), 325 (1996).

[0274] The compounds can also be administered by a method suitable for administration of nucleic acid agents, such as a DNA vaccine. These methods include gene guns, bio injectors, and skin patches as well as needle-free methods such as the micro-particle DNA vaccine technology disclosed in U.S. Pat. No. 6,194,389, and the mammalian transdermal needle-free vaccination with powder-form vaccine as disclosed in U.S. Pat. No. 6,168,587. Additionally, intranasal delivery is possible, as described in, inter alia, Hamajima et al. (1998), Clin. Immunol. Immunopathol., 88(2), 205-10. Liposomes (e.g., as described in U.S. Pat. No. 6,472,375) and microencapsulation can also be used. Biodegradable targetable microparticle delivery systems can also be used (e.g., as described in U.S. Pat. No. 6,471,996).

[0275] In one embodiment, the active compounds are prepared with carriers that will protect the compound against rapid elimination from the body, such as a controlled release formulation, including implants and microencapsulated delivery systems. Biodegradable, biocompatible polymers can be used, such as ethylene vinyl acetate, polyanhydrides, polyglycolic acid, collagen, polyorthoesters, and polylactic acid. Such formulations can be prepared using standard techniques. The materials can also be obtained commercially from Alza Corporation and Nova Pharmaceuticals, Inc. Liposomal suspensions (including liposomes targeted to infected cells with monoclonal antibodies to viral antigens) can also be used as pharmaceutically acceptable carriers. These can be prepared according to methods known to those skilled in the art, for example, as described in U.S. Pat. No. 4,522,811.

[0276] Toxicity and therapeutic efficacy of such compounds can be determined by standard pharmaceutical procedures in cell cultures or experimental animals, e.g., for determining the LD₅₀ (the dose lethal to 50% of the population) and the ED₅₀ (the dose therapeutically effective in 50% of the population). The dose ratio between toxic and therapeutic effects is the therapeutic index and it can be expressed as the ratio LD₅₀/ED₅₀. Compounds which exhibit high therapeutic indices are preferred. While compounds that exhibit toxic side effects may be used, care should be taken to design a delivery system that targets such compounds to the site of affected tissue in order to minimize potential damage to uninfected cells and, thereby, reduce side effects.

[0277] The data obtained from the cell culture assays and animal studies can be used in formulating a range of dosage for use in humans. The dosage of such compounds lies preferably within a range of circulating concentrations that include the ED₅₀ with little or no toxicity. The dosage may vary within this range depending upon the dosage form employed and the route of administration utilized. For a compound used in the method of the invention, the therapeutically effective dose can be estimated initially from cell culture assays. A dose may be formulated in animal models to achieve a circulating plasma concentration range that includes the IC₅₀ (i.e., the concentration of the test compound which achieves a half-maximal inhibition of symptoms) as determined in cell culture. Such information can be used to more accurately determine useful doses in humans. Levels in plasma may be measured, for example, by high performance liquid chromatography.

[0278] As defined herein, a therapeutically effective amount of a nucleic acid molecule (i.e., an effective dosage) depends on the nucleic acid selected. For instance, if a plasmid encoding a DsiRNA agent is selected, single dose amounts in the range of approximately 1 pg to 1000 mg may be administered; in some embodiments, 10, 30, 100, or 1000 pg, or 10, 30, 100, or 1000 ng, or 10, 30, 100, or 1000 μg, or 10, 30, 100, or 1000 mg may be administered. In some embodiments, 1-5 g of the compositions can be administered. The compositions can be administered one from one or more times per day to one or more times per week; including once every other day. The skilled artisan will appreciate that certain factors may influence the dosage and timing required to effectively treat a subject, including but not limited to the severity of the disease or disorder, previous treatments, the general health and/or age of the subject, and other diseases present. Moreover, treatment of a subject with a therapeutically effective amount of a protein, polypeptide, or antibody can include a single treatment or, preferably, can include a series of treatments.

[0279] The nucleic acid molecules of the invention can be inserted into expression constructs, e.g., viral vectors, retroviral vectors, expression cassettes, or plasmid viral vectors, e.g., using methods known in the art, including but not limited to those described in Xia et al., (2002), supra. Expression constructs can be delivered to a subject by, for example, inhalation, orally, intravenous injection, local administration (see U.S. Pat. No. 5,328,470) or by stereotactic injection (see e.g., Chen et al. (1994), Proc. Natl. Acad. Sci. USA, 91, 3054-3057). The pharmaceutical preparation of the delivery vector can include the vector in an acceptable diluent, or can comprise a slow release matrix in which the delivery vehicle is imbedded. Alternatively, where the complete delivery vector can be produced intact from recombinant cells, e.g., retroviral vectors, the pharmaceutical preparation can include one or more cells which produce the gene delivery system.

[0280] The expression constructs may be constructs suitable for use in the appropriate expression system and include, but are not limited to retroviral vectors, linear expression cassettes, plasmids and viral or virally-derived vectors, as known in the art. Such expression constructs may include one or more inducible promoters, RNA Pol III promoter systems such as U6 snRNA promoters or H1 RNA polymerase III promoters, or other promoters known in the art. The constructs can include one or both strands of the siRNA. Expression constructs expressing both strands can also include loop structures linking both strands, or each strand can be separately transcribed from separate promoters within the same construct. Each strand can also be transcribed from a separate expression construct, e.g., Tuschl (2002, Nature Biotechnol 20: 500-505).

[0281] It can be appreciated that the method of introducing DsiRNA agents into the environment of the cell will depend on the type of cell and the make up of its environment. For example, when the cells are found within a liquid, one preferable formulation is with a lipid formulation such as in lipofectamine and the DsiRNA agents can be added directly to the liquid environment of the cells. Lipid formulations can also be administered to animals such as by intravenous, intramuscular, or intraperitoneal injection, or orally or by inhalation or other methods as are known in the art. When the formulation is suitable for administration into animals such as mammals and more specifically humans, the formulation is also pharmaceutically acceptable. Pharmaceutically acceptable formulations for administering oligonucleotides are known and can be used. In some instances, it may be preferable to formulate DsiRNA agents in a buffer or saline solution and directly inject the formulated DsiRNA agents into cells, as in studies with oocytes. The direct injection of DsiRNA agents duplexes may also be done. For suitable methods of introducing dsRNA (e.g., DsiRNA agents), see U.S. published patent application No. 2004/0203145 A1.

[0282] Suitable amounts of a DsiRNA agent must be introduced and these amounts can be empirically determined using standard methods. Typically, effective concentrations of individual DsiRNA agent species in the environment of a cell will be 50 nanomolar or less, 10 nanomolar or less, or compositions in which concentrations of 1 nanomolar or less can be used. In another embodiment, methods utilizing a concentration of 200 picomolar or less, 100 picomolar or less, 50 picomolar or less, 20 picomolar or less, and even a concentration of 10 picomolar or less, 5 picomolar or less, 2 picomolar or less or 1 picomolar or less can be used in many circumstances.

[0283] The method can be carried out by addition of the DsiRNA agent compositions to an extracellular matrix in which cells can live provided that the DsiRNA agent composition is formulated so that a sufficient amount of the DsiRNA agent can enter the cell to exert its effect. For example, the method is amenable for use with cells present in a liquid such as a liquid culture or cell growth media, in tissue explants, or in whole organisms, including animals, such as mammals and especially humans.

[0284] The level or activity of a KRAS RNA can be determined by a suitable method now known in the art or that is later developed. It can be appreciated that the method used to measure a target RNA and/or the expression of a target RNA can depend upon the nature of the target RNA. For example, where the target KRAS RNA sequence encodes a protein, the term “expression” can refer to a protein or the KRAS RNA/transcript derived from the KRAS gene (either genomic or of exogenous origin). In such instances the expression of the target KRAS RNA can be determined by measuring the amount of KRAS RNA/transcript directly or by measuring the amount of KRas protein. Protein can be measured in protein assays such as by staining or immunoblotting or, if the protein catalyzes a reaction that can be measured, by measuring reaction rates. All such methods are known in the art and can be used. Where target KRAS RNA levels are to be measured, art-recognized methods for detecting RNA levels can be used (e.g., RT-PCR, Northern Blotting, etc.). In targeting KRAS RNAs with the DsiRNA agents of the instant invention, it is also anticipated that measurement of the efficacy of a DsiRNA agent in reducing levels of KRAS RNA or protein in a subject, tissue, in cells, either in vitro or in vivo, or in cell extracts can also be used to determine the extent of reduction of KRAS-associated phenotypes (e.g., disease or disorders, e.g., cancer or tumor formation, growth, metastasis, spread, etc.). The above measurements can be made on cells, cell extracts, tissues, tissue extracts or other suitable source material.

[0285] The determination of whether the expression of a KRAS RNA has been reduced can be by a suitable method that can reliably detect changes in RNA levels. Typically, the determination is made by introducing into the environment of a cell undigested DsiRNA such that at least a portion of that DsiRNA agent enters the cytoplasm, and then measuring the level of the target RNA. The same measurement is made on identical untreated cells and the results obtained from each measurement are compared.

[0286] The DsiRNA agent can be formulated as a pharmaceutical composition which comprises a pharmacologically effective amount of a DsiRNA agent and pharmaceutically acceptable carrier. A pharmacologically or therapeutically effective amount refers to that amount of a DsiRNA agent effective to produce the intended pharmacological, therapeutic or preventive result. The phrases “pharmacologically effective amount” and “therapeutically effective amount” or simply “effective amount” refer to that amount of an RNA effective to produce the intended pharmacological, therapeutic or preventive result. For example, if a given clinical treatment is considered effective when there is at least a 20% reduction in a measurable parameter associated with a disease or disorder, a therapeutically effective amount of a drug for the treatment of that disease or disorder is the amount necessary to effect at least a 20% reduction in that parameter.

[0287] Suitably formulated pharmaceutical compositions of this invention can be administered by means known in the art such as by parenteral routes, including intravenous, intramuscular, intraperitoneal, subcutaneous, transdermal, airway (aerosol), rectal, vaginal and topical (including buccal and sublingual) administration. In some embodiments, the pharmaceutical compositions are administered by intravenous or intraparenteral infusion or injection.

[0288] In general, a suitable dosage unit of dsRNA will be in the range of 0.001 to 0.25 milligrams per kilogram body weight of the recipient per day, or in the range of 0.01 to 20 micrograms per kilogram body weight per day, or in the range of 0.01 to 10 micrograms per kilogram body weight per day, or in the range of 0.10 to 5 micrograms per kilogram body weight per day, or in the range of 0.1 to 2.5 micrograms per kilogram body weight per day. Pharmaceutical composition comprising the dsRNA can be administered once daily. However, the therapeutic agent may also be dosed in dosage units containing two, three, four, five, six or more sub-doses administered at appropriate intervals throughout the day. In that case, the dsRNA contained in each sub-dose must be correspondingly smaller in order to achieve the total daily dosage unit. The dosage unit can also be compounded for a single dose over several days, e.g., using a conventional sustained release formulation which provides sustained and consistent release of the dsRNA over a several day period. Sustained release formulations are well known in the art. In this embodiment, the dosage unit contains a corresponding multiple of the daily dose. Regardless of the formulation, the pharmaceutical composition must contain dsRNA in a quantity sufficient to inhibit expression of the target gene in the animal or human being treated. The composition can be compounded in such a way that the sum of the multiple units of dsRNA together contain a sufficient dose.

[0289] Data can be obtained from cell culture assays and animal studies to formulate a suitable dosage range for humans. The dosage of compositions of the invention lies within a range of circulating concentrations that include the ED₅₀ (as determined by known methods) with little or no toxicity. The dosage may vary within this range depending upon the dosage form employed and the route of administration utilized. For a compound used in the method of the invention, the therapeutically effective dose can be estimated initially from cell culture assays. A dose may be formulated in animal models to achieve a circulating plasma concentration range of the compound that includes the IC₅₀ (i.e., the concentration of the test compound which achieves a half-maximal inhibition of symptoms) as determined in cell culture. Such information can be used to more accurately determine useful doses in humans. Levels of dsRNA in plasma may be measured by standard methods, for example, by high performance liquid chromatography.

[0290] The pharmaceutical compositions can be included in a kit, container, pack, or dispenser together with instructions for administration.

### Methods of Treatment

[0291] The present invention provides for both prophylactic and therapeutic methods of treating a subject at risk of (or susceptible to) a disease or disorder caused, in whole or in part, by KRAS (e.g., misregulation and/or elevation of KRAS transcript and/or KRas protein levels), or treatable via selective targeting of KRAS.

[0292] “Treatment”, or “treating” as used herein, is defined as the application or administration of a therapeutic agent (e.g., a DsiRNA agent or vector or transgene encoding same) to a patient, or application or administration of a therapeutic agent to an isolated tissue or cell line from a patient, who has the disease or disorder, a symptom of disease or disorder or a predisposition toward a disease or disorder, with the purpose to cure, heal, alleviate, relieve, alter, remedy, ameliorate, improve or affect the disease or disorder, the symptoms of the disease or disorder, or the predisposition toward disease.

[0293] In one aspect, the invention provides a method for preventing in a subject, a disease or disorder as described above (including, e.g., prevention of the commencement of transforming events within a subject via inhibition of KRAS expression), by administering to the subject a therapeutic agent (e.g., a DsiRNA agent or vector or transgene encoding same). Subjects at risk for the disease can be identified by, for example, one or a combination of diagnostic or prognostic assays as described herein. Administration of a prophylactic agent can occur prior to the detection of, e.g., cancer in a subject, or the manifestation of symptoms characteristic of the disease or disorder, such that the disease or disorder is prevented or, alternatively, delayed in its progression.

[0294] Another aspect of the invention pertains to methods of treating subjects therapeutically, i.e., altering the onset of symptoms of the disease or disorder. These methods can be performed in vitro (e.g., by culturing the cell with the DsiRNA agent) or, alternatively, in vivo (e.g., by administering the DsiRNA agent to a subject).

[0295] With regards to both prophylactic and therapeutic methods of treatment, such treatments may be specifically tailored or modified, based on knowledge obtained from the field of pharmacogenomics. “Pharmacogenomics”, as used herein, refers to the application of genomics technologies such as gene sequencing, statistical genetics, and gene expression analysis to drugs in clinical development and on the market. More specifically, the term refers the study of how a patient's genes determine his or her response to a drug (e.g., a patient's “drug response phenotype”, or “drug response genotype”). Thus, another aspect of the invention provides methods for tailoring an individual's prophylactic or therapeutic treatment with either the target KRAS RNA molecules of the present invention or target KRAS RNA modulators according to that individual's drug response genotype. Pharmacogenomics allows a clinician or physician to target prophylactic or therapeutic treatments to patients who will most benefit from the treatment and to avoid treatment of patients who will experience toxic drug-related side effects.

[0296] Therapeutic agents can be tested in an appropriate animal model. For example, a DsiRNA agent (or expression vector or transgene encoding same) as described herein can be used in an animal model to determine the efficacy, toxicity, or side effects of treatment with said agent. Alternatively, an agent (e.g., a therapeutic agent) can be used in an animal model to determine the mechanism of action of such an agent.

Models Useful to Evaluate the Down-Regulation of KRAS mRNA Levels and Expression

### Cell Culture

[0297] Kita et al., 1999, Int. J. Cancer, 80, 553-558, describes the growth inhibition of human pancreatic cancer cell lines by antisense oligonucleotides specific to mutated KRAS genes. Antisense oligonucleotides were transfected to the transformed cells using liposomes. Cellular proliferation, KRAS mRNA expression, and KRas protein synthesis were all evaluated as endpoints. Sato et al., 2000, Cancer Lett., 155, 153-161, describes another human pancreatic cancer cell line, HOR-P1, that is characterized by high angiogenic activity and metastatic potential. Genetic and molecular analysis of this cell line revealed both increased telomerase activity and a mutation in the KRAS oncogene.

[0298] The DsiRNA agents of the invention can be tested for cleavage activity in vivo, for example, using the following procedure. The nucleotide sequences within the KRAS cDNA targeted by the DsiRNA agents of the invention are shown in the above KRAS sequences.

[0299] The DsiRNA reagents of the invention can be tested in cell culture using HeLa or other mammalian cells to determine the extent of KRAS RNA and KRas protein inhibition. DsiRNA reagents (e.g., see FIGS. 1 and 4, and above-recited structures) are selected against the KRAS target as described herein. KRAS RNA inhibition is measured after delivery of these reagents by a suitable transfection agent to, for example, cultured HeLa cells or other transformed or non-transformed mammalian cells in culture. Relative amounts of target KRAS RNA are measured versus actin or other appropriate control using real-time PCR monitoring of amplification (e.g., ABI 7700 TAQMAN®). A comparison is made to a mixture of oligonucleotide sequences made to unrelated targets or to a randomized DsiRNA control with the same overall length and chemistry, but randomly substituted at each position, or simply to appropriate vehicle-treated or untreated controls. Primary and secondary lead reagents are chosen for the target and optimization performed. After an optimal transfection agent concentration is chosen, a RNA time-course of inhibition is performed with the lead DsiRNA molecule.

[0300] TAQMAN® (Real-Time PCR Monitoring of Amplification) and Lightcycler Quantification of mRNA

[0301] Total RNA is prepared from cells following DsiRNA delivery, for example, using Ambion Rnaqueous 4-PCR purification kit for large scale extractions, or Ambion Rnaqueous-96 purification kit for 96-well assays. For Taqman analysis, dual-labeled probes are synthesized with, for example, the reporter dyes FAM or VIC covalently linked at the 5′-end and the quencher dye TAMARA conjugated to the 3′-end. One-step RT-PCR amplifications are performed on, for example, an ABI PRISM 7700 Sequence detector using 50 uL reactions consisting of 10 uL total RNA, 100 nM forward primer, 100 mM reverse primer, 100 nM probe, 1× TaqMan PCR reaction buffer (PE-Applied Biosystems), 5.5 mM MgCl2, 100 uM each dATP, dCTP, dGTP and dTTP, 0.2 U RNase Inhibitor (Promega), 0.025 U AmpliTaq Gold (PE-Applied Biosystems) and 0.2 U M-MLV Reverse Transcriptase (Promega). The thermal cycling conditions can consist of 30 minutes at 48° C., 10 minutes at 95° C., followed by 40 cycles of 15 seconds at 95° C. and 1 minute at 60° C. Quantitation of target KRAS mRNA level is determined relative to standards generated from serially diluted total cellular RNA (300, 100, 30, 10 ng/rxn) and normalizing to, for example, 36B4 mRNA in either parallel or same tube TaqMan reactions.

[0302] Western Blotting

[0303] Nuclear extracts can be prepared using a standard micro preparation technique (see for example Andrews and Faller, 1991, Nucleic Acids Research, 19, 2499). Protein extracts from supernatants are prepared, for example using TCA precipitation. An equal volume of 20% TCA is added to the cell supernatant, incubated on ice for 1 hour and pelleted by centrifugation for 5 minutes. Pellets are washed in acetone, dried and resuspended in water. Cellular protein extracts are run on a 10% Bis-Tris NuPage (nuclear extracts) or 4-12% Tris-Glycine (supernatant extracts) polyacrylamide gel and transferred onto nitro-cellulose membranes. Non-specific binding can be blocked by incubation, for example, with 5% non-fat milk for 1 hour followed by primary antibody for 16 hours at 4° C. Following washes, the secondary antibody is applied, for example (1:10,000 dilution) for 1 hour at room temperature and the signal detected with SuperSignal reagent (Pierce).

[0304] In several cell culture systems, cationic lipids have been shown to enhance the bioavailability of oligonucleotides to cells in culture (Bennet, et al., 1992, Mol. Pharmacology, 41, 1023-1033). In one embodiment, DsiRNA molecules of the invention are complexed with cationic lipids for cell culture experiments. DsiRNA and cationic lipid mixtures are prepared in serum-free DMEM immediately prior to addition to the cells. DMEM plus additives are warmed to room temperature (about 20-25° C.) and cationic lipid is added to the final desired concentration and the solution is vortexed briefly. DsiRNA molecules are added to the final desired concentration and the solution is again vortexed briefly and incubated for 10 minutes at room temperature. In dose response experiments, the RNA/lipid complex is serially diluted into DMEM following the 10 minute incubation.

### Animal Models

[0305] Evaluating the efficacy of anti-KRAS DsiRNA agents in animal models is an important prerequisite to human clinical trials. Various animal models of cancer and/or proliferative diseases, conditions, or disorders as are known in the art can be adapted for use for pre-clinical evaluation of the efficacy of DsiRNA compositions of the invention in modulating KRAS gene expression toward therapeutic use.

[0306] As in cell culture models, the most Ras sensitive mouse tumor xenografts are those derived from cancer cells that express mutant Ras proteins. Nude mice bearing H-Ras transformed bladder cancer cell xenografts were sensitive to an anti-Ras antisense nucleic acid, resulting in an 80% inhibition of tumor growth after a 31 day treatment period (Wickstrom, 2001, Mol. Biotechnol., 18, 35-35). Zhang et al., 2000, Gene Ther., 7, 2041, describes an anti-KRAS ribozyme adenoviral vector (KRbz-ADV) targeting a KRAS mutant (KRAS codon 12 GGT to GTT; H441 and H1725 cells respectively). Non-small cell lung cancer cells (NSCLC H441 and H1725 cells) that express the mutant KRas protein were used in nude mouse xenografts compared to NSCLC H1650 cells that lack the relevant mutation. Pre-treatment with KRbz-ADV completely abrogated engraftment of both H441 and H1725 cells and compared to 100% engraftment and tumor growth in animals that received untreated tumor cells or a control vector. Additional mouse models of KRAS misregulation/mutation have also been described (e.g., in Kim et al. Cell 121: 823-835, which identified a role of KRAS in promoting lung adenocarcinomas). The above studies provide proof that inhibition of Ras expression (e.g., KRAS expression) by anti-Ras agents causes inhibition of tumor growth in animals.

[0307] As such, these models can be used in evaluating the efficacy of DsiRNA molecules of the invention in inhibiting KRAS levels, expression, tumor/cancer formation, growth, spread, development of other KRAS-associated phenotypes, diseases or disorders, etc. These models and others can similarly be used to evaluate the safety/toxicity and efficacy of DsiRNA molecules of the invention in a pre-clinical setting.

[0308] Specific examples of animal model systems useful for evaluation of the KRAS-targeting DsiRNAs of the instant invention include wild-type mice, orthotopic HCC xenograft tumor model mice (e.g., Hep3B and HepG2) and disseminated melanoma model mice. In an exemplary in vivo experiment, DsiRNAs of the invention are tail vein injected into such mouse models at doses ranging from 1 to 10 mg/kg or, alternatively, repeated doses are administered at single-dose IC₅₀ levels, and organs (e.g., liver, kidney, lung, pancreas, colon, skin, spleen, bone marrow, lymph nodes, mammary fat pad, etc.) are harvested 24 hours after administration of the final dose. Such organs are then evaluated for mouse and/or human KRAS levels, depending upon the model used. Duration of action can also be examined at, e.g., 1, 4, 7, 14, 21 or more days after final DsiRNA administration.

[0309] The practice of the present invention employs, unless otherwise indicated, conventional techniques of chemistry, molecular biology, microbiology, recombinant DNA, genetics, immunology, cell biology, cell culture and transgenic biology, which are within the skill of the art. See, e.g., Maniatis et al., 1982, Molecular Cloning (Cold Spring Harbor Laboratory Press, Cold Spring Harbor, N.Y.); Sambrook et al., 1989, Molecular Cloning, 2nd Ed. (Cold Spring Harbor Laboratory Press, Cold Spring Harbor, N.Y.); Sambrook and Russell, 2001, Molecular Cloning, 3rd Ed. (Cold Spring Harbor Laboratory Press, Cold Spring Harbor, N.Y.); Ausubel et al., 1992), Current Protocols in Molecular Biology (John Wiley & Sons, including periodic updates); Glover, 1985, DNA Cloning (IRL Press, Oxford); Anand, 1992; Guthrie and Fink, 1991; Harlow and Lane, 1988, Antibodies, (Cold Spring Harbor Laboratory Press, Cold Spring Harbor, N.Y.); Jakoby and Pastan, 1979; Nucleic Acid Hybridization (B. D. Hames & S. J. Higgins eds. 1984); Transcription And Translation (B. D. Hames & S. J. Higgins eds. 1984); Culture Of Animal Cells (R. I. Freshney, Alan R. Liss, Inc., 1987); Immobilized Cells And Enzymes (IRL Press, 1986); B. Perbal, A Practical Guide To Molecular Cloning (1984); the treatise, Methods In Enzymology (Academic Press, Inc., N.Y.); Gene Transfer Vectors For Mammalian Cells (J. H. Miller and M. P. Calos eds., 1987, Cold Spring Harbor Laboratory); Methods In Enzymology, Vols. 154 and 155 (Wu et al. eds.), Immunochemical Methods In Cell And Molecular Biology (Mayer and Walker, eds., Academic Press, London, 1987); Handbook Of Experimental Immunology, Volumes I-IV (D. M. Weir and C. C. Blackwell, eds., 1986); Riott, Essential Immunology, 6th Edition, Blackwell Scientific Publications, Oxford, 1988; Hogan et al., Manipulating the Mouse Embryo, (Cold Spring Harbor Laboratory Press, Cold Spring Harbor, N.Y., 1986); Westerfield, M., The zebrafish book. A guide for the laboratory use of zebrafish (Danio rerio), (4th Ed., Univ. of Oregon Press, Eugene, 2000).

[0310] Unless otherwise defined, all technical and scientific terms used herein have the same meaning as commonly understood by one of ordinary skill in the art to which this invention belongs. Although methods and materials similar or equivalent to those described herein can be used in the practice or testing of the present invention, suitable methods and materials are described below. All publications, patent applications, patents, and other references mentioned herein are incorporated by reference in their entirety. In case of conflict, the present specification, including definitions, will control. In addition, the materials, methods, and examples are illustrative only and not intended to be limiting.

### EXAMPLES

[0311] The present invention is described by reference to the following Examples, which are offered by way of illustration and are not intended to limit the invention in any manner. Standard techniques well known in the art or the techniques specifically described below were utilized.

### Example 1: Anti-KRAS DsiRNA Design

[0312] Preferred anti-KRAS DsiRNA agents were selected from a pre-screened population of DsiRNAs. Design of DsiRNAs can optionally involve use of predictive scoring algorithms that perform in silico assessments of the projected activity/efficacy of a number of possible DsiRNAs spanning a region of sequence.

### Example 2: Preparation of Double-Stranded RNA Oligonucleotides

[0313] Oligonucleotide Synthesis and Purification

[0314] DsiRNA molecules can be designed to interact with various sites in the RNA message, for example, target sequences within the RNA sequences described herein. In presently exemplified agents, two target KRAS sequences were selected. The sequence of one strand of the DsiRNA molecules were complementary to the target KRAS site sequences described above. The DsiRNA molecules were chemically synthesized using methods described herein. Generally, DsiRNA constructs were synthesized using solid phase oligonucleotide synthesis methods as described for 19-23mer siRNAs (see for example Usman et al., U.S. Pat. Nos. 5,804,683; 5,831,071; 5,998,203; 6,117,657; 6,353,098; 6,362,323; 6,437,117; 6,469,158; Scaringe et al., U.S. Pat. Nos. 6,111,086; 6,008,400; 6,111,086).

[0315] Individual RNA strands were synthesized and HPLC purified according to standard methods (Integrated DNA Technologies, Coralville, Iowa). For example, RNA oligonucleotides were synthesized using solid phase phosphoramidite chemistry, deprotected and desalted on NAP-5 columns (Amersham Pharmacia Biotech, Piscataway, N.J.) using standard techniques (Damha and Olgivie, 1993, Methods Mol Biol 20: 81-114; Wincott et al., 1995, Nucleic Acids Res 23: 2677-84). The oligomers were purified using ion-exchange high performance liquid chromatography (IE-HPLC) on an Amersham Source 15Q column (1.0 cm×25 cm; Amersham Pharmacia Biotech, Piscataway, N.J.) using a 15 min step-linear gradient. The gradient varies from 90:10 Buffers A:B to 52:48 Buffers A:B, where Buffer A is 100 mM Tris pH 8.5 and Buffer B is 100 mM Tris pH 8.5, 1 M NaCl. Samples were monitored at 260 nm and peaks corresponding to the full-length oligonucleotide species are collected, pooled, desalted on NAP-5 columns, and lyophilized.

[0316] The purity of each oligomer was determined by capillary electrophoresis (CE) on a Beckman PACE 5000 (Beckman Coulter, Inc., Fullerton, Calif.). The CE capillaries had a 100 μm inner diameter and contains ssDNA 100 R Gel (Beckman-Coulter). Typically, about 0.6 nmole of oligonucleotide was injected into a capillary, run in an electric field of 444 V/cm and detected by UV absorbance at 260 nm. Denaturing Tris-Borate-7 M-urea running buffer was purchased from Beckman-Coulter. Oligoribonucleotides were obtained that are at least 90% pure as assessed by CE for use in experiments described below. Compound identity was verified by matrix-assisted laser desorption ionization time-of-flight (MALDI-TOF) mass spectroscopy on a Voyager DE™ Biospectometry Work Station (Applied Biosystems, Foster City, Calif.) following the manufacturer's recommended protocol. Relative molecular masses of all oligomers were obtained, often within 0.2% of expected molecular mass.

### Preparation of Duplexes

[0317] Single-stranded RNA (ssRNA) oligomers were resuspended, e.g., at 100 μM concentration in duplex buffer consisting of 100 mM potassium acetate, 30 mM HEPES, pH 7.5. Complementary sense and antisense strands were mixed in equal molar amounts to yield a final solution of, e.g., 50 μM duplex. Samples were heated to 100° C. for 5′ in RNA buffer (IDT) and allowed to cool to room temperature before use. Double-stranded RNA (dsRNA) oligomers were stored at −20° C. Single-stranded RNA oligomers were stored lyophilized or in nuclease-free water at −80° C.

### Nomenclature

[0318] For consistency, the following nomenclature has been employed in the instant specification. Names given to duplexes indicate the length of the oligomers and the presence or absence of overhangs. A “25/27” is an asymmetric duplex having a 25 base sense strand and a 27 base antisense strand with a 2-base 3′-overhang. A “27/25” is an asymmetric duplex having a 27 base sense strand and a 25 base antisense strand.

[0319] Cell Culture and RNA Transfection

[0320] HeLa cells were obtained from ATCC and maintained in Dulbecco's modified Eagle medium (HyClone) supplemented with 10% fetal bovine serum (HyClone) at 37° C. under 5% CO₂. For RNA transfections, HeLa cells were transfected with DsiRNAs as indicated at a final concentration of 1 nM or 0.1 nM using Lipofectamine™ RNAiMAX (Invitrogen) and following manufacturer's instructions. Briefly, 2.5 μL, of a 0.2 μM or 0.02 μM stock solution of each DsiRNA were mixed with 46.5 μL of Opti-MEM I (Invitrogen) and 1 μL of Lipofectamine™ RNAiMAX. The resulting 50 μL mix was added into individual wells of 12 well plates and incubated for 20 min at RT to allow DsiRNA:Lipofectamine™ RNAiMAX complexes to form. Meanwhile, HeLa cells were trypsinized and resuspended in medium at a final concentration of 367 cells/μL. Finally, 450 μL of the cell suspension were added to each well (final volume 500 μL) and plates were placed into the incubator for 24 hours.

[0321] Assessment of KRAS Inhibition

[0322] KRAS target gene knockdown was determined by qRT-PCR, with values normalized to HPRT expression control treatments, including Lipofectamine™ RNAiMAX alone (Vehicle control) or untreated.

[0323] RNA Isolation and Analysis

[0324] Cells were washed once with 2 mL of PBS, and total RNA was extracted using RNeasy Mini Kit™ (Qiagen) and eluted in a final volume of 30 μL. 1 μg of total RNA was reverse-transcribed using Transcriptor 1^{st} Strand cDNA Kit™ (Roche) and random hexamers following manufacturer's instructions. One-thirtieth (0.66 μL) of the resulting cDNA was mixed with 5 μL of IQ Multiplex Powermix (Bio-Rad) together with 3.33 μL of H₂O and 1 μL of a 3 μM mix containing primers and probes specific for human genes HPRT-1 (accession number NM_000194) and KRAS target sequences.

[0325] Quantitative RT-PCR

[0326] A CFX96 Real-time System with a C1000 Thermal cycler (Bio-Rad) was used for the amplification reactions. PCR conditions were: 95° C. for 3 min; and then cycling at 95° C., 10 sec; 55° C., 1 min for 40 cycles. Each sample was tested in triplicate. Relative HPRT mRNA levels were normalized to KRAS mRNA levels and compared with mRNA levels obtained in control samples treated with the transfection reagent alone, or untreated. Data was analyzed using Bio-Rad CFX Manager version 1.0 software.

### Example 3: KRAS-355 Targeted DsiRNA Inhibition of KRAS

[0327] DsiRNA molecules targeting KRAS were designed and synthesized as described above and tested in HeLa cells for inhibitory efficacy. The ability of DsiRNA agents possessing varying end structures but commonly directed against the same KRAS cDNA target sequence (5′-AGCAGGTCAAGAGGAGTACAGTGCAAT-3′ (SEQ ID NO: 147)) to inhibit KRAS expression was assessed in comparison to corresponding KRAS target sequence-directed 21mer siRNAs (refer to FIG. 1 for anti-KRAS agent structures tested). To perform such experiments, HeLa cells were plated approximately 24 hours before transfection in 96-well plates at 5,000-7,500 cells/well, 100 μl/well, such that at the time of transfection cells were 70-90% confluent. For transfection, annealed DsiRNAs were mixed with the transfection reagent (Lipofectamine™ RNAiMAX, Invitrogen) in a volume of 50 μl/well and incubated for 20 minutes at room temperature. The DsiRNA transfection mixtures were added to cells to give a final DsiRNA concentration of 1 nM (FIG. 2) or 100 pM (FIG. 3) in a volume of 150 μl. Each DsiRNA transfection mixture was added to 3 wells for triplicate DsiRNA treatments. Cells were incubated at 37° C. for 24 hours in the continued presence of the DsiRNA transfection mixture. At 24 hours, RNA was prepared from each well of treated cells. The supernatants with the transfection mixtures were first removed and discarded, then the cells were lysed and RNA prepared from each well. Target KRAS RNA levels following treatment were evaluated by qRT-PCR for the KRAS target gene, with values normalized to those obtained for a vehicle-treated control. Triplicate data was averaged and the standard deviations determined for each treatment. Normalized data were graphed and the fold reduction of target mRNA by active DsiRNAs in comparison to siRNAs and vehicle or untreated controls was determined.

[0328] As shown in FIG. 2, the tested 25/27mer DsiRNA agent (DP1148P/DP1151G) showed significantly greater KRAS inhibitory efficacy at 1 nM concentration than an optimized 21mer siRNA (DP1158P/DP1159G siRNA) directed against the same KRAS target sequence and sharing the same projected Ago2 cleavage site within the target KRAS transcript sequence as all other agents of FIG. 1 that were tested (such Ago2 cleavage site alignment normalizes for variations that might otherwise be attributable to varying levels of RISC activity). Notably, Dicer enzyme cleavage of the tested 25/27mer DsiRNA was projected to generate the exact same “optimized” 21mer siRNA as the “optimized” 21mer tested, with the results obtained emphasizing that DsiRNA agents possess special efficacy/potency advantages over corresponding siRNA agents. Similarly dramatic results at 1 nM concentration were observed for both 27mer blunt/blunt and 27mer blunt/fray DsiRNA agents directed against the KRAS-355 sequence, as compared to 21mer siRNAs possessing blunt/blunt and blunt/fray end structures which were similarly directed against the KRAS-355 sequence. Thus, the 25/27mer and 27mer DsiRNAs tested reproducibly exhibited enhanced inhibitory efficacy against the targeted KRAS transcript as compared to the corresponding 21mer agents concurrently tested. Indeed, all 25/27mer and 27mer DsiRNAs tested at 1 nM concentration surprisingly outperformed all 21mer siRNAs tested at the same concentration.

[0329] Robust inhibitory efficacies were also observed for the anti-KRAS-355 DsiRNA agents at 100 pM concentration (FIG. 3). The tested 25/27mer DsiRNA agent (DP1148P/DP1151G) showed significantly greater KRAS inhibitory efficacy at 100 pM concentration than the optimized 21mer siRNA (DP1158P/DP1159G siRNA) directed against the same KRAS-355 target sequence. Similarly dramatic results at 100 pM concentration were observed for 27mer blunt/fray DsiRNA agents directed against the KRAS-355 sequence, as compared to the corresponding 21mer siRNA possessing blunt/fray end structures. The 27mer blunt/blunt agent was at least equally as effective as the corresponding 21mer blunt/blunt agent that was tested, even if the apparent enhancement of 27mer blunt/blunt agent efficacy relative to 21mer blunt/blunt agent efficacy was not statistically significant at 100 pM concentration. Thus, the 25/27mer and 27mer blunt/fray DsiRNAs tested reproducibly exhibited enhanced inhibitory efficacy against the targeted KRAS transcript as compared to the corresponding 21mer siRNA agents concurrently tested at 100 pM.

### Example 4: KRAS-940 Targeted DsiRNA Inhibition of KRAS

[0330] DsiRNA molecules targeting KRAS were designed and synthesized as described above and tested in HeLa cells for inhibitory efficacy as described in Example 3. The ability of DsiRNA agents possessing varying end structures but commonly directed against the same KRAS cDNA target sequence (5′-TATTAGCATTTGTTTTAGCATTACCTA-3′ (SEQ ID NO: 179)) to inhibit KRAS expression was assessed in comparison to corresponding KRAS target sequence-directed 21mer siRNAs (refer to FIG. 4 for anti-KRAS agent structures tested). As shown in FIG. 5, the tested 25/27mer DsiRNA agent (DP1136P/DP1139G) showed significantly greater KRAS inhibitory efficacy at 1 nM concentration than an optimized 21mer siRNA (DP1146P/DP1147G siRNA) directed against the same KRAS target sequence and sharing the same projected Ago2 cleavage site within the target KRAS transcript sequence as all other agents of FIG. 4 that were tested (such Ago2 cleavage site alignment normalizes for variations that might otherwise be attributable to varying levels of RISC activity). Notably, Dicer enzyme cleavage of the tested 25/27mer DsiRNA was projected to generate the exact same “optimized” 21mer siRNA as the “optimized” 21mer tested, with the results obtained emphasizing that DsiRNA agents possess special efficacy/potency advantages over corresponding siRNA agents. Similarly dramatic results at 1 nM concentration were observed for both 27mer blunt/blunt and 27mer blunt/fray DsiRNA agents directed against the KRAS-940 sequence, as compared to 21mer siRNAs possessing blunt/blunt and blunt/fray end structures which were similarly directed against the KRAS-940 sequence. Thus, the 25/27mer and 27mer DsiRNAs tested reproducibly exhibited enhanced inhibitory efficacy against the targeted KRAS transcript as compared to the corresponding 21mer agents concurrently tested. Indeed, all 25/27mer and 27mer DsiRNAs tested at 1 nM concentration unexpectedly outperformed all 21mer siRNAs tested at the same concentration.

[0331] Robust inhibitory efficacies were also observed for the anti-KRAS-940 DsiRNA agents at 100 pM concentration (FIG. 6). The tested 25/27mer DsiRNA agent (DP1136P/DP1139G) showed significantly greater KRAS inhibitory efficacy at 100 pM concentration than the optimized 21mer siRNA (DP1146P/DP1147G siRNA) directed against the same KRAS-940 target sequence. Similarly dramatic results at 100 pM concentration were observed for 27mer blunt/blunt and blunt/fray DsiRNA agents directed against the KRAS-940 sequence, as compared to the corresponding 21mer siRNAs possessing blunt/blunt and blunt/fray end structures. Thus, the 25/27mer and 27mer blunt/blunt and blunt/fray DsiRNAs tested reproducibly exhibited enhanced inhibitory efficacy against the targeted KRAS transcript as compared to the corresponding 21mer siRNA agents concurrently tested at 100 pM. Indeed, all anti-KRAS-940 25/27mer and 27mer DsiRNAs tested at 100 pM concentration unexpectedly outperformed all 21mer siRNAs which were tested at the same concentration.

### Example 5: Further DsiRNA Inhibition of KRAS

[0332] The forty DsiRNA molecules shown in Table 3 possessing antisense strand SEQ ID NOs: 11-50 and targeting KRAS wild-type sequences (the DsiRNAs of Table 3 targeting alternative/polymorphic sequences were not tested) were designed and synthesized as described above and tested in HeLa cells for inhibitory efficacy as described in Example 3 above. The ability of these DsiRNA agents to inhibit KRAS expression was assessed in comparison to corresponding KRAS target sequence-directed 21mer siRNAs (refer to Table 2 for corresponding anti-KRAS 21mer agent antisense strands tested, and to FIG. 7 for a schematic representation of the experiment). All DsiRNA agents showed efficacy as KRAS inhibitors, with 35 of 40 tested DsiRNA agents exhibiting greater than 50% reduction of the KRAS target. As shown in FIG. 8, for four out of every five DsiRNA-cognate siRNA pairs tested, the DsiRNA agent exhibited significantly superior efficacy in decreasing levels of KRAS target than the cognate siRNA agent. The duration of such inhibitory effects was also examined at both 24 hours and 48 hours post-administration, with concentrations of 1 nM and 5 nM tested. For 26 of the 40 DsiRNA-cognate siRNA pairs, the DsiRNA agent showed statistically significant enhanced levels of KRAS target inhibition than the corresponding cognate siRNA agent at all concentrations and durations tested (FIG. 9). This result was in marked contrast to the only 6 of 40 instances in which the cognate siRNA agent outperformed the DsiRNA agent (FIG. 9). Thus, statistically significant distinctions were observed between DsiRNAs and matched cognate siRNAs (possessing aligned projected Ago2 cleavage sites) across the KRAS target RNA. By a large majority, the DsiRNAs dramatically and unexpectedly outperformed cognate siRNAs. Importantly, these results demonstrated that DsiRNA activity did not directly correlate with siRNA activity, nor did the converse hold. Accordingly, the above results demonstrated that DsiRNAs and siRNAs engage the RNA interference machinery differently, and that DsiRNAs and siRNAs—in spite of both comprising double-stranded RNA—are, in fact, different drugs.

[0333] As shown in FIGS. 10 and 11, IC₅₀ values were determined for 29 of these 40 KRAS-targeting asymmetric DsiRNAs. Remarkably, 15 of these 29 asymmetric DsiRNAs exhibited IC₅₀ values below 10 pM, further documenting the remarkable potency of these DsiRNAs.

### Example 6: Assay of 243 Selected KRAS-Targeting DsiRNAs for KRAS Inhibition

[0334] In this example, 243 asymmetric DsiRNAs (here, as above, tested DsiRNAs possessed a 25/27mer structure) were constructed and tested for KRAS inhibitory efficacy in human HeLa and mouse Hepa 1-6 cells incubated in the presence of such DsiRNAs at a concentration of 1 nM. The 243 asymmetric DsiRNAs tested included a subset of DsiRNAs selected from Tables 2-5 above, as well as a further set of asymmetric DsiRNAs designed to target specific sequences within human KRAS, mouse KRAS, or both. Sequences and structures of these additional 243 asymmetric DsiRNAs are shown in Table 8.

TABLE 8
Additional Anti-KRAS Asymmetric (25/27mer)
DsiRNA Agent Structures Tested
in Human HeLa and Mouse Hepa 1-6 Cells

5′-GAGGCCUGCUGAAAAUGACUGAAta-3′
(SEQ ID NO: 4650)
3′-CUCUCCGGACGACUUUUACUGACUUAU-5′
(SEQ ID NO: 4407)
KRAS-166 Target: 5′-GAGAGGCCTGCTGAAAATGACTGAATA-3′
(SEQ ID NO: 4893)
5′-AGGCCUGCUGAAAAUGACUGAAUat-3′
(SEQ ID NO: 4651)
3′-UCUCCGGACGACUUUUACUGACUUAUA-5′
(SEQ ID NO: 4408)
KRAS-167 Target: 5′-AGAGGCCTGCTGAAAATGACTGAATAT-3′
(SEQ ID NO: 4894)
5′-GGCCUGCUGAAAAUGACUGAAUAta-3′
(SEQ ID NO: 4652)
3′-CUCCGGACGACUUUUACUGACUUAUAU-5′
(SEQ ID NO: 4409)
KRAS-168 Target: 5′-GAGGCCTGCTGAAAATGACTGAATATA-3′
(SEQ ID NO: 4895)
5′-GCCUGCUGAAAAUGACUGAAUAUaa-3′
(SEQ ID NO: 4653)
(SEQ ID NO: 4896)
3′-UCCGGACGACUUUUACUGACUUAUAUU-5′
(SEQ ID NO: 4410)
KRAS-169 Target: 5′-AGGCCTGCTGAAAATGACTGAATATAA-3′
5′-GUUGGAGCUGGUGGCGUAGGCAAga-3′
(SEQ ID NO: 4654)
3′-AUCAACCUCGACCACCGCAUCCGUUCU-5′
(SEQ ID NO: 4411)
KRAS-2 04 Target: 5′-TAGTTGGAGCTGGTGGCGTAGGCAAGA-3′
(SEQ ID NO: 4897)
5′-UUGGAGCUGGUGGCGUAGGCAAGag-3′
(SEQ ID NO: 4655)
3′-UCAACCUCGACCACCGCAUCCGUUCUC-5′
(SEQ ID NO: 4412)
KRAS-205 Target: 5′-AGTTGGAGCTGGTGGCGTAGGCAAGAG-3′
(SEQ ID NO: 4898)
5′-UGGAGCUGGUGGCGUAGGCAAGAgt-3′
(SEQ ID NO: 4656)
3′-CAACCUCGACCACCGCAUCCGUUCUCA-5′
(SEQ ID NO: 4413)
KRAS-206 Target: 5′-GTTGGAGCTGGTGGCGTAGGCAAGAGT-3′
(SEQ ID NO: 4899)
5′-GGAGCUGGUGGCGUAGGCAAGAGtg-3′
(SEQ ID NO: 4657)
3′-AACCUCGACCACCGCAUCCGUUCUCAC-5′
(SEQ ID NO: 4414)
KRAS-207 Target: 5′-TTGGAGCTGGTGGCGTAGGCAAGAGTG-3′
(SEQ ID NO: 4900)
5′-GAGCUGGUGGCGUAGGCAAGAGUgc-3′
(SEQ ID NO: 4658)
3′-ACCUCGACCACCGCAUCCGUUCUCACG-5′
(SEQ ID NO: 4415)
KRAS-2 08 Target: 5′-TGGAGCTGGTGGCGTAGGCAAGAGTGC-3′
(SEQ ID NO: 4901)
5′-AGCUGGUGGCGUAGGCAAGAGUGCC-3′
(SEQ ID NO: 4659)
3′-CCUCGACCACCGCAUCCGUUCUCACGG-5′
(SEQ ID NO: 4416)
KRAS-209 Target: 5′-GGAGCTGGTGGCGTAGGCAAGAGTGCC-3′
(SEQ ID NO: 4902)
5′-GCUGGUGGCGUAGGCAAGAGUGCct-3′
(SEQ ID NO: 4660)
3′-CUCGACCACCGCAUCCGUUCUCACGGA-5′
(SEQ ID NO: 4417)
KRAS-210 Target: 5′-GAGCTGGTGGCGTAGGCAAGAGTGCCT-3′
(SEQ ID NO: 4903)
5′-UACAGCUAAUUCAGAAUCAUUUUgt-3′
(SEQ ID NO: 4661)
3′-CUAUGUCGAUUAAGUCUUAGUAAAACA-5′
(SEQ ID NO: 4418)
KRAS-241 Target: 5′-GATACAGCTAATTCAGAATCATTTTGT-3′
(SEQ ID NO: 4904)
5′-UAAUUGAUGGAGAAACCUGUCUCtt-3′
(SEQ ID NO: 4662)
3′-UCAUUAACUACCUCUUUGGACAGAGAA-5′
(SEQ ID NO: 4419)
KRAS-313 Target: 5′-AGTAATTGATGGAGAAACCTGTCTCTT-3′
(SEQ ID NO: 4905)
5′-AAUUGAUGGAGAAACCUGUCUCUtg-3′
(SEQ ID NO: 4663)
3′-CAUUAACUACCUCUUUGGACAGAGAAC-5′
(SEQ ID NO: 4420)
KRAS-314 Target: 5′-GTAATTGATGGAGAAACCTGTCTCTTG-3′
5′-GAUGGAGAAACCUGUCUCUUGGAta-3′
(SEQ ID NO: 4664)
3′-AACUACCUCUUUGGACAGAGAACCUAU-5′
(SEQ ID NO: 4421)
KRAS-318 Target: 5′-TTGATGGAGAAACCTGTCTCTTGGATA-3′
(SEQ ID NO: 4907)
5′-CCUGUCUCUUGGAUAUUCUCGACac-3′
(SEQ ID NO: 4665)
3′-UUGGACAGAGAACCUAUAAGAGCUGUG-5′
(SEQ ID NO: 4422)
KRAS-328 Target: 5′-AACCTGTCTCTTGGATATTCTCGACAC-3′
(SEQ ID NO: 4908)
5′-UGUCUCUUGGAUAUUCUCGACACag-3′
(SEQ ID NO: 4666)
3′-GGACAGAGAACCUAUAAGAGCUGUGUC-5′
(SEQ ID NO: 4423)
KRAS-330 Target: 5′-CCTGTCTCTTGGATATTCTCGACACAG-3′
(SEQ ID NO: 4909)
5′-GUCUCUUGGAUAUUCUCGACACAgc-3′
(SEQ ID NO: 4667)
3′-GACAGAGAACCUAUAAGAGCUGUGUCG-5′
(SEQ ID NO: 4424)
KRAS-331 Target: 5′-CTGTCTCTTGGATATTCTCGACACAGC-3′
(SEQ ID NO: 4910)
5′-UCUCUUGGAUAUUCUCGACACAGca-3′
(SEQ ID NO: 4668)
3′-ACAGAGAACCUAUAAGAGCUGUGUCGU-5′
(SEQ ID NO: 4425)
KRAS-332 Target: 5′-TGTCTCTTGGATATTCTCGACACAGCA-3′
(SEQ ID NO: 4911)
5′-CUCUUGGAUAUUCUCGACACAGCag-3′
(SEQ ID NO: 4669)
3′-CAGAGAACCUAUAAGAGCUGUGUCGUC-5′
(SEQ ID NO: 4426)
KRAS-333 Target: 5′-GTCTCTTGGATATTCTCGACACAGCAG-3′
(SEQ ID NO: 4912)
5′-UCUUGGAUAUUCUCGACACAGCAgg-3′
(SEQ ID NO: 4670)
3′-AGAGAACCUAUAAGAGCUGUGUCGUCC-5′
(SEQ ID NO: 4427)
KRAS-334 Target: 5′-TCTCTTGGATATTCTCGACACAGCAGG-3′
(SEQ ID NO: 4913)
5′-CUUGGAUAUUCUCGACACAGCAGgt-3′
(SEQ ID NO: 4671)
3′-GAGAACCUAUAAGAGCUGUGUCGUCCA-5′
(SEQ ID NO: 4428)
KRAS-335 Target: 5′-CTCTTGGATATTCTCGACACAGCAGGT-3′
(SEQ ID NO: 4914)
5′-UUGGAUAUUCUCGACACAGCAGGtc-3′
(SEQ ID NO: 4672)
3′-AGAACCUAUAAGAGCUGUGUCGUCCAG-5′
(SEQ ID NO: 4429)
KRAS-336 Target: 5′-TCTTGGATATTCTCGACACAGCAGGTC-3′
(SEQ ID NO: 4915)
5′-CAGCAGGUCAAGAGGAGUACAGUgc-3′
(SEQ ID NO: 4673)
3′-GUGUCGUCCAGUUCUCCUCAUGUCACG-5′
(SEQ ID NO: 4430)
KRAS-352 Target: 5′-CACAGCAGGTCAAGAGGAGTACAGTGC-3′
(SEQ ID NO: 4916)
5′-AGCAGGUCAAGAGGAGUACAGUGca-3′
(SEQ ID NO: 4674)
3′-UGUCGUCCAGUUCUCCUCAUGUCACGU-5′
(SEQ ID NO: 4431)
KRAS-353 Target: 5′-ACAGCAGGTCAAGAGGAGTACAGTGCA-3′
(SEQ ID NO: 4917)
5′-GCAGGUCAAGAGGAGUACAGUGCaa-3′
(SEQ ID NO: 4675)
3′-GUCGUCCAGUUCUCCUCAUGUCACGUU-5′
(SEQ ID NO: 4432)
KRAS-354 Target: 5′-CAGCAGGTCAAGAGGAGTACAGTGCAA-3′
(SEQ ID NO: 4918)
5′-AGGAGUACAGUGCAAUGAGGGACca-3′
(SEQ ID NO: 4676)
3′-UCUCCUCAUGUCACGUUACUCCCUGGU-5′
(SEQ ID NO: 4433)
KRAS-364 Target: 5′-AGAGGAGTACAGTGCAATGAGGGACCA-3′
(SEQ ID NO: 4919)
5′-GGAGUACAGUGCAAUGAGGGACCag-3′
(SEQ ID NO: 4677)
3′-CUCCUCAUGUCACGUUACUCCCUGGUC-5′
(SEQ ID NO: 4434)
KRAS-365 Target: 5′-GAGGAGTACAGTGCAATGAGGGACCAG-3′
(SEQ ID NO: 4920)
5′-GAGUACAGUGCAAUGAGGGACCAgt-3′
(SEQ ID NO: 4678)
3′-UCCUCAUGUCACGUUACUCCCUGGUCA-5′
(SEQ ID NO: 4435)
KRAS-366 Target: 5′-AGGAGTACAGTGCAATGAGGGACCAGT-3′
(SEQ ID NO: 4921)
5′-AGUACAGUGCAAUGAGGGACCAGta-3′
(SEQ ID NO: 4679)
3′-CCUCAUGUCACGUUACUCCCUGGUCAU-5′
(SEQ ID NO: 4436)
KRAS-367 Target: 5′-GGAGTACAGTGCAATGAGGGACCAGTA-3′
(SEQ ID NO: 4922)
5′-GUACAGUGCAAUGAGGGACCAGUac-3′
(SEQ ID NO: 4680)
3′-CUCAUGUCACGUUACUCCCUGGUCAUG-5′
(SEQ ID NO: 4437)
KRAS-368 Target: 5′-GAGTACAGTGCAATGAGGGACCAGTAC-3′
(SEQ ID NO: 4923)
5′-UACAGUGCAAUGAGGGACCAGUAca-3′
(SEQ ID NO: 4681)
3′-UCAUGUCACGUUACUCCCUGGUCAUGU-5′
(SEQ ID NO: 4438)
KRAS-369 Target: 5′-AGTACAGTGCAATGAGGGACCAGTACA-3′
(SEQ ID NO: 4924)
5′-ACAGUGCAAUGAGGGACCAGUACat-3′
(SEQ ID NO: 4682)
3′-CAUGUCACGUUACUCCCUGGUCAUGUA-5′
(SEQ ID NO: 4439)
KRAS-370 Target: 5′-GTACAGTGCAATGAGGGACCAGTACAT-3′
(SEQ ID NO: 4925)
5′-CAGUGCAAUGAGGGACCAGUACAtg-3′
(SEQ ID NO: 4683)
3′-AUGUCACGUUACUCCCUGGUCAUGUAC-5′
(SEQ ID NO: 4440)
KRAS-371 Target: 5′-TACAGTGCAATGAGGGACCAGTACATG-3′
(SEQ ID NO: 4926)
5′-AGUGCAAUGAGGGACCAGUACAUga-3′
(SEQ ID NO: 4684)
3′-UGUCACGUUACUCCCUGGUCAUGUACU-5′
(SEQ ID NO: 4441)
KRAS-372 Target: 5′-ACAGTGCAATGAGGGACCAGTACATGA-3′
(SEQ ID NO: 4927)
5′-GUAUUUGCCAUAAAUAAUACUAAat-3′
(SEQ ID NO: 4685)
3′-CACAUAAACGGUAUUUAUUAUGAUUUA-5′
(SEQ ID NO: 4442)
KRAS-420 Target: 5′-GTGTATTTGCCATAAATAATACTAAAT-3′
(SEQ ID NO: 4928)
5′-UAUUUGCCAUAAAUAAUACUAAAtC-3′
(SEQ ID NO: 4686)
3′-ACAUAAACGGUAUUUAUUAUGAUUUAG-5′
(SEQ ID NO: 4443)
KRAS-421 Target: 5′-TGTATTTGCCATAAATAATACTAAATC-3′
(SEQ ID NO: 4929)
5′-AUUUGCCAUAAAUAAUACUAAAUca-3′
(SEQ ID NO: 4487)
3′-CAUAAACGGUAUUUAUUAUGAUUUAGU-5′
(SEQ ID NO: 4444)
KRAS-422 Target: 5′-GTATTTGCCATAAATAATACTAAATCA-3′
(SEQ ID NO: 4930)
5′-UUUGCCAUAAAUAAUACUAAAUCat-3′
(SEQ ID NO: 4488)
3′-AUAAACGGUAUUUAUUAUGAUUUAGUA-5′
(SEQ ID NO: 4445)
KRAS-423 Target: 5′-TATTTGCCATAAATAATACTAAATCAT-3′
(SEQ ID NO: 4931)
5′-UUGCCAUAAAUAAUACUAAAUCAtt-3′
(SEQ ID NO: 4489)
3′-UAAACGGUAUUUAUUAUGAUUUAGUAA-5′
(SEQ ID NO: 4446)
KRAS-424 Target: 5′-ATTTGCCATAAATAATACTAAATCATT-3′
(SEQ ID NO: 4932)
5′-UGCCAUAAAUAAUACUAAAUCAUtt-3′
(SEQ ID NO: 4690)
3′-AAACGGUAUUUAUUAUGAUUUAGUAAA-5′
(SEQ ID NO: 4447)
KRAS-425 Target: 5′-TTTGCCATAAATAATACTAAATCATTT-3′
(SEQ ID NO: 4933)
5′-GCCAUAAAUAAUACUAAAUCAUUtg-3′
(SEQ ID NO: 4691)
3′-AACGGUAUUUAUUAUGAUUUAGUAAAC-5′
(SEQ ID NO: 4448)
KRAS-426 Target: 5′-TTGCCATAAATAATACTAAATCATTTG-3′
(SEQ ID NO: 4934)
5′-AUACUAAAUCAUUUGAAGAUAUUca-3′
(SEQ ID NO: 4692)
3′-AUUAUGAUUUAGUAAACUUCUAUAAGU-5′
(SEQ ID NO: 4449)
KRAS-436 Target: 5′-TAATACTAAATCATTTGAAGATATTCA-3′
(SEQ ID NO: 4935)
5′-UACUAAAUCAUUUGAAGAUAUUCac-3′
(SEQ ID NO: 4693)
3′-UUAUGAUUUAGUAAACUUCUAUAAGUG-5′
(SEQ ID NO: 4450)
KRAS-437 Target: 5′-AATACTAAATCATTTGAAGATATTCAC-3′
(SEQ ID NO: 4936)
5′-ACUAAAUCAUUUGAAGAUAUUCAcc-3′
(SEQ ID NO: 4694)
3′-UAUGAUUUAGUAAACUUCUAUAAGUGG-5′
(SEQ ID NO: 4451)
KRAS-438 Target: 5′-ATACTAAATCATTTGAAGATATTCACC-3′
(SEQ ID NO: 4937)
5′-CUAAAUCAUUUGAAGAUAUUCACca-3′
(SEQ ID NO: 4695)
3′-AUGAUUUAGUAAACUUCUAUAAGUGGU-5′
(SEQ ID NO: 4452)
KRAS-439 Target: 5′-TACTAAATCATTTGAAGATATTCACCA-3′
(SEQ ID NO: 4938)
5′-UAAAUCAUUUGAAGAUAUUCACCat-3′
(SEQ ID NO: 4696)
3′-UGAUUUAGUAAACUUCUAUAAGUGGUA-5′
(SEQ ID NO: 4453)
KRAS-440 Target: 5′-ACTAAATCATTTGAAGATATTCACCAT-3′
(SEQ ID NO: 4939)
5′-AAAUCAUUUGAAGAUAUUCACCAtt-3′
(SEQ ID NO: 4697)
3′-GAUUUAGUAAACUUCUAUAAGUGGUAA-5′
(SEQ ID NO: 4454)
KRAS-441 Target: 5′-CTAAATCATTTGAAGATATTCACCATT-3′
(SEQ ID NO: 4940)
5′-AAUCAUUUGAAGAUAUUCACCAUta-3′
(SEQ ID NO: 4698)
3′-AUUUAGUAAACUUCUAUAAGUGGUAAU-5′
(SEQ ID NO: 4698)
KRAS-442 Target: 5′-TAAATCATTTGAAGATATTCACCATTA-3′
(SEQ ID NO: 4941)
5′-AUCAUUUGAAGAUAUUCACCAUUat-3′
(SEQ ID NO: 4699)
3′-UUUAGUAAACUUCUAUAAGUGGUAAUA-5′
(SEQ ID NO: 4456)
KRAS-443 Target: 5′-AAATCATTTGAAGATATTCACCATTAT-3′
(SEQ ID NO: 4942)
5′-UCAUUUGAAGAUAUUCACCAUUAta-3′
(SEQ ID NO: 4700)
3′-UUAGUAAACUUCUAUAAGUGGUAAUAU-5′
(SEQ ID NO: 4457)
KRAS-444 Target: 5′-AATCATTTGAAGATATTCACCATTATA-3′
(SEQ ID NO: 4943)
5′-AUAUUCACCAUUAUAGAGAACAAat-3′
(SEQ ID NO: 4701)
3′-UCUAUAAGUGGUAAUAUCUCUUGUUUA-5′
(SEQ ID NO: 4458)
KRAS-454 Target: 5′-AGATATTCACCATTATAGAGAACAAAT-3′
(SEQ ID NO: 4944)
5′-UAUUCACCAUUAUAGAGAACAAAtt-3′
(SEQ ID NO: 4702)
3′-CUAUAAGUGGUAAUAUCUCUUGUUUAA-5′
(SEQ ID NO: 4459)
KRAS-455 Target: 5′-GATATTCACCATTATAGAGAACAAATT-3′
(SEQ ID NO: 4945)
5′-AUUCACCAUUAUAGAGAACAAAUta-3′
(SEQ ID NO: 4703)
3′-UAUAAGUGGUAAUAUCUCUUGUUUAAU-5′
(SEQ ID NO: 4460)
KRAS-456 Target: 5′-ATATTCACCATTATAGAGAACAAATTA-3′
(SEQ ID NO: 4946)
5′-UUCACCAUUAUAGAGAACAAAUUaa-3′
(SEQ ID NO: 4704)
3′-AUAAGUGGUAAUAUCUCUUGUUUAAUU-5′
(SEQ ID NO: 4461)
KRAS-457 Target: 5′-TATTCACCATTATAGAGAACAAATTAA-3′
(SEQ ID NO: 4947)
5′-UCACCAUUAUAGAGAACAAAUUAaa-3′
(SEQ ID NO: 4705)
3′-UAAGUGGUAAUAUCUCUUGUUUAAUUU-5′
(SEQ ID NO: 4462)
KRAS-458 Target: 5′-ATTCACCATTATAGAGAACAAATTAAA-3′
(SEQ ID NO: 4948)
5′-CACCAUUAUAGAGAACAAAUUAAaa-3′
(SEQ ID NO: 4706)
3′-AAGUGGUAAUAUCUCUUGUUUAAUUUU-5′
(SEQ ID NO: 4463)
KRAS-459 Target: 5′-TTCACCATTATAGAGAACAAATTAAAA-3′
(SEQ ID NO: 4949)
5′-ACCAUUAUAGAGAACAAAUUAAAag-3′
(SEQ ID NO: 4707)
3′-AGUGGUAAUAUCUCUUGUUUAAUUUUC-5′
(SEQ ID NO: 4464)
KRAS-460 Target: 5′-TCACCATTATAGAGAACAAATTAAAAG-3′
(SEQ ID NO: 4950)
5′-CCAUUAUAGAGAACAAAUUAAAAga-3′
(SEQ ID NO: 4708)
3′-GUGGUAAUAUCUCUUGUUUAAUUUUCU-5′
(SEQ ID NO: 4465)
KRAS-461 Target: 5′-CACCATTATAGAGAACAAATTAAAAGA-3′
(SEQ ID NO: 4951)
5′-CAUUAUAGAGAACAAAUUAAAAGag-3′
(SEQ ID NO: 4709)
3′-UGGUAAUAUCUCUUGUUUAAUUUUCUC-5′
(SEQ ID NO: 4466)
KRAS-462 Target: 5′-ACCATTATAGAGAACAAATTAAAAGAG-3′
(SEQ ID NO: 4952)
5′-CUAUGGUCCUAGUAGGAAAUAAAtg-3′
(SEQ ID NO: 4710)
3′-UGGAUACCAGGAUCAUCCUUUAUUUAC-5′
(SEQ ID NO: 4467)
KRAS-508 Target: 5′-ACCTATGGTCCTAGTAGGAAATAAATG-3′
(SEQ ID NO: 4953)
5′-UGUGAUUUGCCUUCUAGAACAGUag-3′
(SEQ ID NO: 4711)
3′-UUACACUAAACGGAAGAUCUUGUCAUC-5′
(SEQ ID NO: 4468)
KRAS-531 Target: 5′-AATGTGATTTGCCTTCTAGAACAGTAG-3′
(SEQ ID NO: 4954)
5′-GUGAUUUGCCUUCUAGAACAGUAga-3′
(SEQ ID NO: 4712)
3′-UACACUAAACGGAAGAUCUUGUCAUCU-5′
(SEQ ID NO: 4469)
KRAS-532 Target: 5′-ATGTGATTTGCCTTCTAGAACAGTAGA-3′
(SEQ ID NO: 4955)
5′-GAUUUGCCUUCUAGAACAGUAGAca-3′
(SEQ ID NO: 4713)
3′-CACUAAACGGAAGAUCUUGUCAUCUGU-5′
(SEQ ID NO: 4470)
KRAS-534 Target: 5′-GTGATTTGCCTTCTAGAACAGTAGACA-3′
(SEQ ID NO: 4956)
5′-GUUAUGGAAUUCCUUUUAUUGAAac-3′
(SEQ ID NO: 4714)
3′-UUCAAUACCUUAAGGAAAAUAACUUUG-5′
(SEQ ID NO: 4471)
KRAS-586 Target: 5′-AAGTTATGGAATTCCTTTTATTGAAAC-3′
(SEQ ID NO: 4957)
5′-UUAUGGAAUUCCUUUUAUUGAAAca-3′
(SEQ ID NO: 4715)
3′-UCAAUACCUUAAGGAAAAUAACUUUGU-5′
(SEQ ID NO: 4472)
KRAS-587 Target: 5′-AGTTATGGAATTCCTTTTATTGAAACA-3′
(SEQ ID NO: 4958)
5′-UAUGGAAUUCCUUUUAUUGAAACat-3′
(SEQ ID NO: 4716)
3′-CAAUACCUUAAGGAAAAUAACUUUGUA-5′
(SEQ ID NO: 4473)
KRAS-588 Target: 5′-GTTATGGAATTCCTTTTATTGAAACAT-3′
(SEQ ID NO: 4959)
5′-GAUGCCUUCUAUACAUUAGUUCGag-3′
(SEQ ID NO: 4717)
3′-UACUACGGAAGAUAUGUAAUCAAGCUC-5′
(SEQ ID NO: 4474)
KRAS-763 Target: 5′-ATGATGCCTTCTATACATTAGTTCGAG-3′
(SEQ ID NO: 4960)
5′-AUGCCUUCUAUACAUUAGUUCGAga-3′
(SEQ ID NO: 4718)
3′-ACUACGGAAGAUAUGUAAUCAAGCUCU-5′
(SEQ ID NO: 4475)
KRAS-764 Target: 5′-TGATGCCTTCTATACATTAGTTCGAGA-3′
(SEQ ID NO: 4961)
5′-CGAGAAAUUCGAAAACAUAAAGAaa-3′
(SEQ ID NO: 4719)
3′-AAGCUCUUUAAGCUUUUGUAUUUCUUU-5′
(SEQ ID NO: 4476)
KRAS-784 Target: 5′-TTCGAGAAATTCGAAAACATAAAGAAA-3′
(SEQ ID NO: 4962)
5′-GAAAACAUAAAGAAAAGAUGAGCaa-3′
(SEQ ID NO: 4720)
3′-AGCUUUUGUAUUUCUUUUCUACUCGUU-5′
(SEQ ID NO: 4477)
KRAS-794 Target: 5′-TCGAAAACATAAAGAAAAGATGAGCAA-3′
(SEQ ID NO: 4963)
5′-AAAACAUAAAGAAAAGAUGAGCAaa-3′
(SEQ ID NO: 4721)
3′-GCUUUUGUAUUUCUUUUCUACUCGUUU-5′
(SEQ ID NO: 4478)
KRAS-795 Target: 5′-CGAAAACATAAAGAAAAGATGAGCAAA-3′
(SEQ ID NO: 4964)
5′-AAACAUAAAGAAAAGAUGAGCAAag-3′
(SEQ ID NO: 4722)
3′-CUUUUGUAUUUCUUUUCUACUCGUUUC-5′
(SEQ ID NO: 4479)
KRAS-796 Target: 5′-GAAAACATAAAGAAAAGATGAGCAAAG-3′
(SEQ ID NO: 4965)
5′-AACAUAAAGAAAAGAUGAGCAAAga-3′
(SEQ ID NO: 4723)
3′-UUUUGUAUUUCUUUUCUACUCGUUUCU-5′
(SEQ ID NO: 4480)
KRAS-797 Target: 5′-AAAACATAAAGAAAAGATGAGCAAAGA-3′
(SEQ ID NO: 4966)
5′-ACAUAAAGAAAAGAUGAGCAAAGat-3′
(SEQ ID NO: 4724)
3′-UUUGUAUUUCUUUUCUACUCGUUUCUA-5′
(SEQ ID NO: 4481)
KRAS-798 Target: 5′-AAACATAAAGAAAAGATGAGCAAAGAT-3′
(SEQ ID NO: 4967)
5′-CAUAAAGAAAAGAUGAGCAAAGAtg-3′
(SEQ ID NO: 4725)
3′-UUGUAUUUCUUUUCUACUCGUUUCUAC-5′
(SEQ ID NO: 4482)
KRAS-799 Target: 5′-AACATAAAGAAAAGATGAGCAAAGATG-3′
(SEQ ID NO: 4968)
5′-AUAAAGAAAAGAUGAGCAAAGAUgg-3′
(SEQ ID NO: 4726)
3′-UGUAUUUCUUUUCUACUCGUUUCUACC-5′
(SEQ ID NO: 4483)
KRAS-800 Target: 5′-ACATAAAGAAAAGATGAGCAAAGATGG-3′
(SEQ ID NO: 4969)
5′-UAAAGAAAAGAUGAGCAAAGAUGgt-3′
(SEQ ID NO: 4727)
3′-GUAUUUCUUUUCUACUCGUUUCUACCA-5′
(SEQ ID NO: 4484)
KRAS-801 Target: 5′-CATAAAGAAAAGATGAGCAAAGATGGT-3′
(SEQ ID NO: 4970)
5′-AAAGAAAAGAUGAGCAAAGAUGGta-3′
(SEQ ID NO: 4728)
3′-UAUUUCUUUUCUACUCGUUUCUACCAU-5′
(SEQ ID NO: 4485)
KRAS-802 Target: 5′-ATAAAGAAAAGATGAGCAAAGATGGTA-3′
(SEQ ID NO: 4971)
5′-AAGUGGUAAUUUUUGUACAUUACac-3′
(SEQ ID NO: 4729)
3′-UGUUCACCAUUAAAAACAUGUAAUGUG-5′
(SEQ ID NO: 4486)
KRAS-908 Target: 5′-ACAAGTGGTAATTTTTGTACATTACAC-3′
(SEQ ID NO: 4972)
5′-AGUGGUAAUUUUUGUACAUUACAct-3′
(SEQ ID NO: 4730)
3′-GUUCACCAUUAAAAACAUGUAAUGUGA-5′
(SEQ ID NO: 4487)
KRAS-909 Target: 5′-CAAGTGGTAATTTTTGTACATTACACT-3′
(SEQ ID NO: 4973)
5′-UUGUACAUUACACUAAAUUAUUAgc-3′
(SEQ ID NO: 4731)
3′-AAAACAUGUAAUGUGAUUUAAUAAUCG-5′
(SEQ ID NO: 4488)
KRAS-920 Target: 5′-TTTTGTACATTACACTAAATTATTAGC-3′
(SEQ ID NO: 4974)
5′-UGUACAUUACACUAAAUUAUUAGca-3′
(SEQ ID NO: 4732)
3′-AAACAUGUAAUGUGAUUUAAUAAUCGU-5′
(SEQ ID NO: 4489)
KRAS-921 Target: 5′-TTTGTACATTACACTAAATTATTAGCA-3′
(SEQ ID NO: 4975)
5′-GUACAUUACACUAAAUUAUUAGCat-3′
(SEQ ID NO: 4733)
3′-AACAUGUAAUGUGAUUUAAUAAUCGUA-5′
(SEQ ID NO: 4490)
KRAS-922 Target: 5′-TTGTACATTACACTAAATTATTAGCAT-3′
(SEQ ID NO: 4976)
5′-UACAUUACACUAAAUUAUUAGCAtt-3′
(SEQ ID NO: 4734)
3′-ACAUGUAAUGUGAUUUAAUAAUCGUAA-5′
(SEQ ID NO: 4491)
KRAS-923 Target: 5′-TGTACATTACACTAAATTATTAGCATT-3′
(SEQ ID NO: 4977)
5′-ACAUUACACUAAAUUAUUAGCAUtt-3′
(SEQ ID NO: 4735)
3′-CAUGUAAUGUGAUUUAAUAAUCGUAAA-5′
(SEQ ID NO: 4492)
KRAS-924 Target: 5′-GTACATTACACTAAATTATTAGCATTT-3′
(SEQ ID NO: 4978)
5′-CAUUACACUAAAUUAUUAGCAUUtg-3′
(SEQ ID NO: 4736)
3′-AUGUAAUGUGAUUUAAUAAUCGUAAAC-5′
(SEQ ID NO: 4493)
KRAS-925 Target: 5′-TACATTACACTAAATTATTAGCATTTG-3′
(SEQ ID NO: 4979)
5′-AUUACACUAAAUUAUUAGCAUUUgt-3′
(SEQ ID NO: 4737)
3′-UGUAAUGUGAUUUAAUAAUCGUAAACA-5′
(SEQ ID NO: 4494)
KRAS-926 Target: 5′-ACATTACACTAAATTATTAGCATTTGT-3′
(SEQ ID NO: 4980)
5′-UUACACUAAAUUAUUAGCAUUUGtt-3′
(SEQ ID NO: 4738)
3′-GUAAUGUGAUUUAAUAAUCGUAAACAA-5′
(SEQ ID NO: 4495)
KRAS-927 Target: 5′-CATTACACTAAATTATTAGCATTTGTT-3′
(SEQ ID NO: 4981)
5′-UACACUAAAUUAUUAGCAUUUGUtt-3′
(SEQ ID NO: 4739)
3′-UAAUGUGAUUUAAUAAUCGUAAACAAA-5′
(SEQ ID NO: 4496)
KRAS-928 Target: 5′-ATTACACTAAATTATTAGCATTTGTTT-3′
(SEQ ID NO: 4982)
5′-UAUUAGCAUUUGUUUUAGCAUUACC-3′
(SEQ ID NO: 4740)
3′-UAAUAAUCGUAAACAAAAUCGUAAUGG-5′
(SEQ ID NO: 4497)
KRAS-938 Target: 5′-ATTATTAGCATTTGTTTTAGCATTACC-3′
(SEQ ID NO: 4983)
5′-AUUAGCAUUUGUUUUAGCAUUACct-3′
(SEQ ID NO: 4741)
3′-AAUAAUCGUAAACAAAAUCGUAAUGGA-5′
(SEQ ID NO: 4498)
KRAS-939 Target: 5′-TTATTAGCATTTGTTTTAGCATTACCT-3′
(SEQ ID NO: 4984)
5′-UUAGCAUUUGUUUUAGCAUUACCta-3′
(SEQ ID NO: 4742)
3′-AUAAUCGUAAACAAAAUCGUAAUGGAU-5′
(SEQ ID NO: 4499)
KRAS-940 Target: 5′-TATTAGCATTTGTTTTAGCATTACCTA-3′
(SEQ ID NO: 4985)
5′-UAGCAUUUGUUUUAGCAUUACCUaa-3′
(SEQ ID NO: 4743)
3′-UAAUCGUAAACAAAAUCGUAAUGGAUU-5′
(SEQ ID NO: 4500)
KRAS-941 Target: 5′-ATTAGCATTTGTTTTAGCATTACCTAA-3′
(SEQ ID NO: 4986)
5′-AGCAUUUGUUUUAGCAUUACCUAat-3′
(SEQ ID NO: 4744)
3′-AAUCGUAAACAAAAUCGUAAUGGAUUA-5′
(SEQ ID NO: 4501)
KRAS-942 Target: 5′-TTAGCATTTGTTTTAGCATTACCTAAT-3′
(SEQ ID NO: 4987)
5′-GCAUUUGUUUUAGCAUUACCUAAtt-3′
(SEQ ID NO: 4745)
3′-AUCGUAAACAAAAUCGUAAUGGAUUAA-5′
(SEQ ID NO: 4502)
KRAS-943 Target: 5′-TAGCATTTGTTTTAGCATTACCTAATT-3′
(SEQ ID NO: 4988)
5′-CAUUUGUUUUAGCAUUACCUAAUtt-3′
(SEQ ID NO: 4746)
3′-UCGUAAACAAAAUCGUAAUGGAUUAAA-5′
(SEQ ID NO: 4503)
KRAS-944 Target: 5′-AGCATTTGTTTTAGCATTACCTAATTT-3′
(SEQ ID NO: 4989)
5′-AUUUGUUUUAGCAUUACCUAAUUtt-3′
(SEQ ID NO: 4747)
3′-CGUAAACAAAAUCGUAAUGGAUUAAAA-5′
(SEQ ID NO: 4504)
KRAS-945 Target: 5′-GCATTTGTTTTAGCATTACCTAATTTT-3′
(SEQ ID NO: 4990)
5′-UUUGUUUUAGCAUUACCUAAUUUtt-3′
(SEQ ID NO: 4748)
3′-GUAAACAAAAUCGUAAUGGAUUAAAAA-5′
(SEQ ID NO: 4505)
KRAS-946 Target: 5′-CATTTGTTTTAGCATTACCTAATTTTT-3′
(SEQ ID NO: 4991)
5′-CUUAUUUUAAAAUGACAGUGGAAgt-3′
(SEQ ID NO: 4749)
3′-ACGAAUAAAAUUUUACUGUCACCUUCA-5′
(SEQ ID NO: 4506)
KRAS-1010 Target: 5′-TGCTTATTTTAAAATGACAGTGGAAGT-3′
(SEQ ID NO: 4992)
5′-UAUUUUAAAAUGACAGUGGAAGUtt-3′
(SEQ ID NO: 4750)
3′-GAAUAAAAUUUUACUGUCACCUUCAAA-5′
(SEQ ID NO: 4507)
KRAS-1012 Target: 5′-CTTATTTTAAAATGACAGTGGAAGTTT-3′
(SEQ ID NO: 4993)
5′-UCUAAGUGCCAGUAUUCCCAGAGtt-3′
(SEQ ID NO: 4751)
3′-GGAGAUUCACGGUCAUAAGGGUCUCAA-5′
(SEQ ID NO: 4508)
KRAS-1045 Target: 5′-CCTCTAAGTGCCAGTATTCCCAGAGTT-3′
(SEQ ID NO: 4994)
5′-CAAAUUAAUGAAGCUUUUGAAUCat-3′
(SEQ ID NO: 4752)
3′-UUGUUUAAUUACUUCGAAAACUUAGUA-5′
(SEQ ID NO: 4509)
KRAS-1197 Target: 5′-AACAAATTAATGAAGCTTTTGAATCAT-3′
(SEQ ID NO: 4995)
5′-AAAUUAAUGAAGCUUUUGAAUCAtC-3′
(SEQ ID NO: 4753)
3′-UGUUUAAUUACUUCGAAAACUUAGUAG-5′
(SEQ ID NO: 4510)
KRAS-1198 Target: 5′-ACAAATTAATGAAGCTTTTGAATCATC-3′
(SEQ ID NO: 4996)
5′-UGUGUUUUAUCUAGUCACAUAAAtg-3′
(SEQ ID NO: 4754)
3′-AGACACAAAAUAGAUCAGUGUAUUUAC-5′
(SEQ ID NO: 4511)
KRAS-1230 Target: 5′-TCTGTGTTTTATCTAGTCACATAAATG-3′
(SEQ ID NO: 4997)
5′-GUGUUUUAUCUAGUCACAUAAAUgg-3′
(SEQ ID NO: 4755)
3′-GACACAAAAUAGAUCAGUGUAUUUACC-5′
(SEQ ID NO: 4512)
KRAS-1231 Target: 5′-CTGTGTTTTATCTAGTCACATAAATGG-3′
(SEQ ID NO: 4998)
5′-UUUUAUCUAGUCACAUAAAUGGAtt-3′
(SEQ ID NO: 4756)
3′-ACAAAAUAGAUCAGUGUAUUUACCUAA-5′
(SEQ ID NO: 4513)
KRAS-1234 Target: 5′-TGTTTTATCTAGTCACATAAATGGATT-3′
(SEQ ID NO: 4999)
5′-UAAAUGGAUUAAUUACUAAUUUCag-3′
(SEQ ID NO: 4757)
3′-GUAUUUACCUAAUUAAUGAUUAAAGUC-5′
(SEQ ID NO: 4514)
KRAS-1249 Target: 5′-CATAAATGGATTAATTACTAATTTCAG-3′
(SEQ ID NO: 5000)
5′-AAAUGGAUUAAUUACUAAUUUCAgt-3′
(SEQ ID NO: 4758)
3′-UAUUUACCUAAUUAAUGAUUAAAGUCA-5′
(SEQ ID NO: 4515)
KRAS-1250 Target: 5′-ATAAATGGATTAATTACTAATTTCAGT-3′
(SEQ ID NO: 5001)
5′-AUUGGUUUUUACUGAAACAUUGAgg-3′
(SEQ ID NO: 4759)
3′-AUUAACCAAAAAUGACUUUGUAACUCC-5′
(SEQ ID NO: 4516)
KRAS-1287 Target: 5′-TAATTGGTTTTTACTGAAACATTGAGG-3′
(SEQ ID NO: 5002)
5′-CAUUUCCUUUUCACAUUAGAUAAat-3′
(SEQ ID NO: 4760)
3′-CGGUAAAGGAAAAGUGUAAUCUAUUUA-5′
(SEQ ID NO: 4517)
KRAS-1527 Target: 5′-GCCATTTCCTTTTCACATTAGATAAAT-3′
(SEQ ID NO: 5003)
5′-CUUUUCACAUUAGAUAAAUUACUat-3′
(SEQ ID NO: 4761)
3′-AGGAAAAGUGUAAUCUAUUUAAUGAUA-5′
(SEQ ID NO: 4518)
KRAS-1533 Target: 5′-TCCTTTTCACATTAGATAAATTACTAT-3′
(SEQ ID NO: 5004)
5′-CAUUAGAUAAAUUACUAUAAAGAct-3′
(SEQ ID NO: 4762)
3′-GUGUAAUCUAUUUAAUGAUAUUUCUGA-5′
(SEQ ID NO: 4519)
KRAS-1540 Target: 5′-CACATTAGATAAATTACTATAAAGACT-3′
(SEQ ID NO: 5005)
5′-AUUAGAUAAAUUACUAUAAAGACtC-3′
(SEQ ID NO: 4763)
3′-UGUAAUCUAUUUAAUGAUAUUUCUGAG-5′
(SEQ ID NO: 4520)
KRAS-1541 Target: 5′-ACATTAGATAAATTACTATAAAGACTC-3′
(SEQ ID NO: 5006)
5′-UUAGAUAAAUUACUAUAAAGACUcc-3′
(SEQ ID NO: 4764)
3′-GUAAUCUAUUUAAUGAUAUUUCUGAGG-51
(SEQ ID NO: 4521)
KRAS-1542 Target: 5′-CATTAGATAAATTACTATAAAGACTCC-3′
(SEQ ID NO: 5007)
5′-UAAGGCAGACCCAGUAUGAAAUGgg-3′
(SEQ ID NO: 4765)
3′-CAAUUCCGUCUGGGUCAUACUUUACCC-5′
(SEQ ID NO: 4522)
KRAS-1583 Target: 5′-GTTAAGGCAGACCCAGTATGAAATGGG-3′
(SEQ ID NO: 5008)
5′-AAGGCAGACCCAGUAUGAAAUGGgg-3′
(SEQ ID NO: 4766)
3′-AAUUCCGUCUGGGUCAUACUUUACCCC-5′
(SEQ ID NO: 4523)
KRAS-1584 Target: 5′-TTAAGGCAGACCCAGTATGAAATGGGG-3′
(SEQ ID NO: 5009)
5′-AGGCAGACCCAGUAUGAAAUGGGga-3′
(SEQ ID NO: 4767)
3′-AUUCCGUCUGGGUCAUACUUUACCCCU-5′
(SEQ ID NO: 4524)
KRAS-1585 Target: 5′-TAAGGCAGACCCAGTATGAAATGGGGA-3′
(SEQ ID NO: 5010)
5′-GGCAGACCCAGUAUGAAAUGGGGat-3′
(SEQ ID NO: 4768)
3′-UUCCGUCUGGGUCAUACUUUACCCCUA-5′
(SEQ ID NO: 4525)
KRAS-1586 Target: 5′-AAGGCAGACCCAGTATGAAATGGGGAT-3′
(SEQ ID NO: 5011)
5′-UAUGAAAUGGGGAUUAUUAUAGCaa-3′
(SEQ ID NO: 4769)
3′-UCAUACUUUACCCCUAAUAAUAUCGUU-5′
(SEQ ID NO: 4526)
KRAS-1597 Target: 5′-AGTATGAAATGGGGATTATTATAGCAA-3′
(SEQ ID NO: 5012)
5′-GGGAUUAUUAUAGCAACCAUUUUgg-3′
(SEQ ID NO: 4770)
3′-ACCCCUAAUAAUAUCGUUGGUAAAACC-5′
(SEQ ID NO: 4527)
KRAS-1606 Target: 5′-TGGGGATTATTATAGCAACCATTTTGG-3′
(SEQ ID NO: 5013)
5′-GGGCUAUAUUUACAUGCUACUAAat-3′
(SEQ ID NO: 4771)
3′-ACCCCGAUAUAAAUGUACGAUGAUUUA-5′
(SEQ ID NO: 4528)
KRAS-1630 Target: 5′-TGGGGCTATATTTACATGCTACTAAAT-3′
(SEQ ID NO: 5014)
5′-GGCUAUAUUUACAUGCUACUAAAtt-3′
(SEQ ID NO: 4772)
3′-CCCCGAUAUAAAUGUACGAUGAUUUAA-5′
(SEQ ID NO: 4529)
KRAS-1631 Target: 5′-GGGGCTATATTTACATGCTACTAAATT-3′
(SEQ ID NO: 5015)
5′-GCUAUAUUUACAUGCUACUAAAUtt-3′
(SEQ ID NO: 4773)
3′-CCCGAUAUAAAUGUACGAUGAUUUAAA-5′
(SEQ ID NO: 4530)
KRAS-1632 Target: 5′-GGGCTATATTTACATGCTACTAAATTT-3′
(SEQ ID NO: 5016)
5′-CUAUAUUUACAUGCUACUAAAUUtt-3′
(SEQ ID NO: 4774)
3′-CCGAUAUAAAUGUACGAUGAUUUAAAA-5′
(SEQ ID NO: 4531)
KRAS-1633 Target: 5′-GGCTATATTTACATGCTACTAAATTTT-3′
(SEQ ID NO: 5017)
5′-UAUAUUUACAUGCUACUAAAUUUtt-3′
(SEQ ID NO: 4775)
3′-CGAUAUAAAUGUACGAUGAUUUAAAAA-5′
(SEQ ID NO: 4532)
KRAS-1634 Target: 5′-GCTATATTTACATGCTACTAAATTTTT-3′
(SEQ ID NO: 5018)
5′-AUAUUUACAUGCUACUAAAUUUUta-3′
(SEQ ID NO: 4776)
3′-GAUAUAAAUGUACGAUGAUUUAAAAAU-5′
(SEQ ID NO: 4533)
KRAS-1635 Target: 5′-CTATATTTACATGCTACTAAATTTTTA-3′
(SEQ ID NO: 5019)
5′-UAUUUACAUGCUACUAAAUUUUUat-3′
(SEQ ID NO: 4777)
3′-AUAUAAAUGUACGAUGAUUUAAAAAUA-5′
(SEQ ID NO: 4534)
KRAS-1636 Target: 5′-TATATTTACATGCTACTAAATTTTTAT-3′
(SEQ ID NO: 5020)
5′-AUUUACAUGCUACUAAAUUUUUAta-3′
(SEQ ID NO: 4778)
3′-UAUAAAUGUACGAUGAUUUAAAAAUAU-5′
(SEQ ID NO: 4535)
KRAS-1637 Target: 5′-ATATTTACATGCTACTAAATTTTTATA-3′
(SEQ ID NO: 5021)
5′-UUUACAUGCUACUAAAUUUUUAUaa-3′
(SEQ ID NO: 4779)
3′-AUAAAUGUACGAUGAUUUAAAAAUAUU-5′
(SEQ ID NO: 4536)
KRAS-1638 Target: 5′-TATTTACATGCTACTAAATTTTTATAA-3′
(SEQ ID NO: 5022)
5′-UUACAUGCUACUAAAUUUUUAUAat-3′
(SEQ ID NO: 4780)
3′-UAAAUGUACGAUGAUUUAAAAAUAUUA-5′
(SEQ ID NO: 4537)
KRAS-1639 Target: 5′-ATTTACATGCTACTAAATTTTTATAAT-3′
(SEQ ID NO: 5023)
5′-UACAUGCUACUAAAUUUUUAUAAta-3′
(SEQ ID NO: 4781)
3′-AAAUGUACGAUGAUUUAAAAAUAUUAU-5′
(SEQ ID NO: 4538)
KRAS-1640 Target: 5′-TTTACATGCTACTAAATTTTTATAATA-3′
(SEQ ID NO: 5024)
5′-CUUUCAUAGUAUAACUUUAAAUCtt-3′
(SEQ ID NO: 4782)
3′-GAGAAAGU AUC AU AUUGAAAUUUAGAA-5′
(SEQ ID NO: 4539)
KRAS-1736 Target: 5′-CTCTTTCATAGTATAACTTTAAATCTT-3′
(SEQ ID NO: 5025)
5′-AUAGUAUAACUUUAAAUCUUUUCtt-3′
(SEQ ID NO: 4783)
3′-AGUAUCAUAUUGAAAUUUAGAAAAGAA- 5′
(SEQ ID NO: 4540)
KRAS-1741 Target: 5′-TCATAGTATAACTTTAAATCTTTTCTT-3′
(SEQ ID NO: 5026)
5′-UAGUAUAACUUUAAAUCUUUUCUtc-3′
(SEQ ID NO: 4784)
3′-GUAUCAUAUUGAAAUUUAGAAAAGAAG-5′
(SEQ ID NO: 4541)
KRAS-1742 Target: 5′-CATAGTATAACTTTAAATCTTTTCTTC-3′
(SEQ ID NO: 5027)
5′-UAAAUCUUUUCUUCAACUUGAGUct-3′
(SEQ ID NO: 4785)
3′-AAAUUUAGAAAAGAAGUUGAACUCAGA-5′
(SEQ ID NO: 4542)
KRAS-1753 Target: 5′-TTTAAATCTTTTCTTCAACTTGAGTCT-3′
(SEQ ID NO: 5028)
5′-AAAUCUUUUCUUCAACUUGAGUCtt-3′
(SEQ ID NO: 4786)
3′-AAUUUAGAAAAGAAGUUGAACUCAGAA-5′
(SEQ ID NO: 4543)
KRAS-1754 Target: 5 1 -TTAAATCTTTTCTTCAACTTGAGTCTT-3′
(SEQ ID NO: 5029)
5′-CUUGAGUCUUUGAAGAUAGUUUUaa-3′
(SEQ ID NO: 4787)
3′-UUGAACUCAGAAACUUCUAUCAAAAUU-5′
(SEQ ID NO: 4544)
KRAS-1769 Target: 5′-AACTTGAGTCTTTGAAGATAGTTTTAA-3′
(SEQ ID NO: 5030)
5′-UGAGUCUUUGAAGAUAGUUUUAAtt-3′
(SEQ ID NO: 4788)
3′-GAACUCAGAAACUUCUAUCAAAAUUAA-5′
(SEQ ID NO: 4545)
KRAS-1771 Target: 5′-CTTGAGTCTTTGAAGATAGTTTTAATT-3′
(SEQ ID NO: 5031)
5′-GAGUCUUUGAAGAUAGUUUUAAUtC-3′
(SEQ ID NO: 4789)
3′-AACUCAGAAACUUCUAUCAAAAUUAAG-5′
(SEQ ID NO: 4546)
KRAS-1772 Target: 5′-TTGAGTCTTTGAAGATAGTTTTAATTC-3′
(SEQ ID NO: 5032)
5′-GAUAGUUUUAAUUCUGCUUGUGAca-3′
(SEQ ID NO: 4790)
3′-UUCUAUCAAAAUUAAGACGAACACUGU-5′
(SEQ ID NO: 4547)
KRAS-1783 Target: 5′-AAGATAGTTTTAATTCTGCTTGTGACA-3′
(SEQ ID NO: 5033)
5′-AUAGUUUUAAUUCUGCUUGUGACat-3′
(SEQ ID NO: 4791)
3′-UCUAUCAAAAUUAAGACGAACACUGUA-5′
(SEQ ID NO: 4548)
KRAS-1784 Target: 5′-AGATAGTTTTAATTCTGCTTGTGACAT-3′
(SEQ ID NO: 5034)
5′-UAGUUUUAAUUCUGCUUGUGACAtt-3′
(SEQ ID NO: 4792)
3′-CUAUCAAAAUUAAGACGAACACUGUAA-5′
(SEQ ID NO: 4549)
KRAS-1785 Target: 5′-GATAGTTTTAATTCTGCTTGTGACATT-3′
(SEQ ID NO: 5035)
5′-CUUGUGACAUUAAAAGAUUAUUUgg-3′
(SEQ ID NO: 4793)
3′-ACGAACACUGUAAUUUUCUAAUAAACC-5′
(SEQ ID NO: 4550)
KRAS-1799 Target: 5′-TGCTTGTGACATTAAAAGATTATTTGG-3′
(SEQ ID NO: 5036)
5′-UAUUAACUCAAAAGUUGAGAUUUtg-3′
(SEQ ID NO: 4794)
3′-UUAUAAUUGAGUUUUCAACUCUAAAAC-5′
(SEQ ID NO: 4551)
KRAS-2100 Target: 5′-AATATTAACTCAAAAGTTGAGATTTTG-3′
(SEQ ID NO: 5037)
5′-UGUGCCAAGACAUUAAUUUUUUUtt-3′
(SEQ ID NO: 4795)
3′-CCACACGGUUCUGUAAUUAAAAAAAAA-5′
(SEQ ID NO: 4552)
KRAS-2134 Target: 5′-GGTGTGCCAAGACATTAATTTTTTTTT-3′
(SEQ ID NO: 5038)
5′-UGGUUAAAUUAACAUUGCAUAAAca-3′
(SEQ ID NO: 4796)
3′-UGACCAAUUUAAUUGUAACGUAUUUGU-5′
(SEQ ID NO: 4553)
KRAS-2216 Target: 5′-ACTGGTTAAATTAACATTGCATAAACA-3′
(SEQ ID NO: 5039)
5′-GGUUAAAUUAACAUUGCAUAAACac-3′
(SEQ ID NO: 4797)
3′-GACCAAUUUAAUUGUAACGUAUUUGUG-5′
(SEQ ID NO: 4554)
KRAS-2217 Target: 5′-CTGGTTAAATTAACATTGCATAAACAC-3′
(SEQ ID NO: 5040)
5′-GUUAAAUUAACAUUGCAUAAACAct-3′
(SEQ ID NO: 4798)
3′-ACCAAUUUAAUUGUAACGUAUUUGUGA-5′
(SEQ ID NO: 4555)
KRAS-2218 Target: 5′-TGGTTAAATTAACATTGCATAAACACT-3′
(SEQ ID NO: 5041)
5′-AUUGCAUAAACACUUUUCAAGUCtg-3′
(SEQ ID NO: 4799)
3′-UGUAACGUAUUUGUGAAAAGUUCAGAC-5′
(SEQ ID NO: 4556)
KRAS-2229 Target: 5′-ACATTGCATAAACACTTTTCAAGTCTG-3′
(SEQ ID NO: 5042)
5′-AAGUCUGAUCCAUAUUUAAUAAUgc-3′
(SEQ ID NO: 4800)
3′-AGUUCAGACUAGGUAUAAAUUAUUACG-5′
(SEQ ID NO: 4557)
KRAS-2247 Target: 5′-TCAAGTCTGATCCATATTTAATAATGC-3′
(SEQ ID NO: 5043)
5′-UAAAAUAAAUGAAGUGAGAUGGCat-3′
(SEQ ID NO: 4801)
3′-AAAUUUUAUUUACUUCACUCUACCGUA-5′
(SEQ ID NO: 4558)
KRAS-2326 Target: 5′-TTTAAAATAAATGAAGTGAGATGGCAT-3′
(SEQ ID NO: 5044)
5′-AAAAUAAAUGAAGUGAGAUGGCAtg-3′
(SEQ ID NO: 4802)
3′-AAUUUUAUUUACUUCACUCUACCGUAC-5′
(SEQ ID NO: 4559)
KRAS-2327 Target: 5′-TTAAAATAAATGAAGTGAGATGGCATG-3′
(SEQ ID NO: 5045)
5′-AAGCUCAGCACAAUCUGUAAAUUtt-3′
(SEQ ID NO: 4803)
3′-AGUUCGAGUCGUGUUAGACAUUUAAAA-5′
(SEQ ID NO: 4560)
KRAS-2547 Target: 5′-TCAAGCTCAGCACAATCTGTAAATTTT-3′
(SEQ ID NO: 5046)
5′-AGCUCAGCACAAUCUGUAAAUUUtt-3′
(SEQ ID NO: 4804)
3′-GUUCGAGUCGUGUUAGACAUUUAAAAA-5′
(SEQ ID NO: 4561)
KRAS-2548 Target: 5′-CAAGCTCAGCACAATCTGTAAATTTTT-3′
(SEQ ID NO: 5047)
5′-AUAACUGUGAUUCUUUUAGGACAat-3′
(SEQ ID NO: 4805)
3′-CGUAUUGACACUAAGAAAAUCCUGUUA-5′
(SEQ ID NO: 4562)
KRAS-3741 Target: 5′-GCATAACTGTGATTCTTTTAGGACAAT-3′
(SEQ ID NO: 5048)
5′-UGUGAUUCUUUUAGGACAAUUACtg-3′
(SEQ ID NO: 4806)
3′-UGACACUAAGAAAAUCCUGUUAAUGAC-5′
(SEQ ID NO: 4563)
KRAS-3746 Target: 5′-ACTGTGATTCTTTTAGGACAATTACTG-3′
(SEQ ID NO: 5049)
5′-GUGAUUCUUUUAGGACAAUUACUgt-3′
(SEQ ID NO: 4807)
3′-GACACUAAGAAAAUCCUGUUAAUGACA-5′
(SEQ ID NO: 4564
KRAS-3747 Target: 5′-CTGTGATTCTTTTAGGACAATTACTGT-3′
(SEQ ID NO: 5050)
5′-UGUAUGUCAGAUAUUCAUAUUGAcc-3′
(SEQ ID NO: 4808)
3′-CCACAUACAGUCUAUAAGUAUAACUGG-5′
(SEQ ID NO: 4565)
KRAS-3783 Target: 5′-GGTGTATGTCAGATATTCATATTGACC-3′
(SEQ ID NO: 5051)
5′-GUAUGUCAGAUAUUCAUAUUGACcc-3′
(SEQ ID NO: 4809)
3′-CACAUACAGUCUAUAAGUAUAACUGGG-5′
(SEQ ID NO: 4566)
KRAS-3784 Target: 5′-GTGTATGTCAGATATTCATATTGACCC-3′
(SEQ ID NO: 5052)
5′-AAUGUGUAAUAUUCCAGUUUUCUct-3′
(SEQ ID NO: 4810)
3′-GUUUACACAUUAUAAGGUCAAAAGAGA-5′
(SEQ ID NO: 4567)
KRAS-3810 Target: 5′-CAAATGTGTAATATTCCAGTTTTCTCT-3′
(SEQ ID NO: 5053)
5′-CACUGCAUAGGAAUUUAGAACCUaa-3′
(SEQ ID NO: 4811)
3′-GUGUGACGUAUCCUUAAAUCUUGGAUU-5′
(SEQ ID NO: 4568)
KRAS-4396 Target: 5′-CACACTGCATAGGAATTTAGAACCTAA-3′
(SEQ ID NO: 5054)
5′-CACCAUUGCACAAUUUUGUCCUAat-3′
(SEQ ID NO: 4812)
3′-CAGUGGUAACGUGUUAAAACAGGAUUA-5′
(SEQ ID NO: 4569)
KRAS-4447 Target: 5′-GTCACCATTGCACAATTTTGTCCTAAT-3′
(SEQ ID NO: 5055)
5′-ACCAUUGCACAAUUUUGUCCUAAta-3′
(SEQ ID NO: 4813)
3′-AGUGGUAACGUGUUAAAACAGGAUUAU-5′
(SEQ ID NO: 4570)
KRAS-4448 Target: 5′-TCACCATTGCACAATTTTGTCCTAATA-3′
(SEQ ID NO: 5056)
5′-CCAUUGCACAAUUUUGUCCUAAUat-3′
(SEQ ID NO: 4814)
3′-GUGGUAACGUGUUAAAACAGGAUUAUA-5′
(SEQ ID NO: 4571)
KRAS-4449 Target: 5′-CACCATTGCACAATTTTGTCCTAATAT-3′
(SEQ ID NO: 5057)
5′-CAUUGCACAAUUUUGUCCUAAUAta-3′
(SEQ ID NO: 4815)
3′-UGGUAACGUGUUAAAACAGGAUUAUAU-5′
(SEQ ID NO: 4572)
KRAS-4450 Target: 5′-ACCATTGCACAATTTTGTCCTAATATA-3′
(SEQ ID NO: 5058)
5′-AUUGCACAAUUUUGUCCUAAUAUat-3′
(SEQ ID NO: 4816)
3′-GGUAACGUGUUAAAACAGGAUUAUAUA-5′
(SEQ ID NO: 4573)
KRAS-4451 Target: 5′-CCATTGCACAATTTTGTCCTAATATAT-3′
(SEQ ID NO: 5059)
5′-UUGCACAAUUUUGUCCUAAUAUAta-3′
(SEQ ID NO: 4817)
3′-GUAACGUGUUAAAACAGGAUUAUAUAU-5′
(SEQ ID NO: 4574)
KRAS-4452 Target: 5′-CATTGCACAATTTTGTCCTAATATATA-3′
(SEQ ID NO: 5060)
5′-UAGCAUGAAUUCUGCAUUGAGAAac-3′
(SEQ ID NO: 4818)
3′-CUAUCGUACUUAAGACGUAACUCUUUG-5′
(SEQ ID NO: 4575)
KRAS-4748 Target: 5′-GATAGCATGAATTCTGCATTGAGAAAC-3′
(SEQ ID NO: 5061)
5′-AGCAUGAAUUCUGCAUUGAGAAAct-3′
(SEQ ID NO: 4819)
3′-UAUCGUACUUAAGACGUAACUCUUUGA-5′
(SEQ ID NO: 4576)
KRAS-4749 Target: 5′-ATAGCATGAATTCTGCATTGAGAAACT-3′
(SEQ ID NO: 5062)
5′-UUUGAAGUGCCUGUUUGGGAUAAtg-3′
(SEQ ID NO: 4820)
3′-UCAAACUUCACGGACAAACCCUAUUAC-5′
(SEQ ID NO: 4577)
KRAS-4878 Target: 5′-AGTTTGAAGTGCCTGTTTGGGATAATG-3′
(SEQ ID NO: 5063)
5′-UUGAAGUGCCUGUUUGGGAUAAUga-3′
(SEQ ID NO: 4821)
3′-CAAACUUCACGGACAAACCCUAUUACU-5′
(SEQ ID NO: 4578)
KRAS-4879 Target: 51-GTTTGAAGTGCCTGTTTGGGATAATGA-3′
(SEQ ID NO: 5064)
5′-UGAAGUGCCUGUUUGGGAUAAUGat-3′
(SEQ ID NO: 4822)
3′-AAACUUCACGGACAAACCCUAUUACUA-5′
(SEQ ID NO: 4579)
KRAS-4880 Target: 5′-TTTGAAGTGCCTGTTTGGGATAATGAT-3′
(SEQ ID NO: 5065)
5′-UUUGAGUGCCAAUUUCUUACUAGta-3′
(SEQ ID NO: 4823)
3′-GGAAACUCACGGUUAAAGAAUGAUCAU-5′
(SEQ ID NO: 4580)
KRAS-5073 Target: 5′-CCTTTGAGTGCCAATTTCTTACTAGTA-3′
(SEQ ID NO: 5066)
5′-UUGAGUGCCAAUUUCUUACUAGUac-3′
(SEQ ID NO: 4824)
3′-GAAACUCACGGUUAAAGAAUGAUCAUG-5′
(SEQ ID NO: 4581)
KRAS-5074 Target: 5′-CTTTGAGTGCCAATTTCTTACTAGTAC-3′
(SEQ ID NO: 5067)
5′-UGAGUGCCAAUUUCUUACUAGUAct-3′
(SEQ ID NO: 4825)
3′-AAACUCACGGUUAAAGAAUGAUCAUGA-5′
(SEQ ID NO: 4582)
KRAS-5075 Target: 5′-TTTGAGTGCCAATTTCTTACTAGTACT-3′
(SEQ ID NO: 5068)
5′-GAGUGCCAAUUUCUUACUAGUACta-3′
(SEQ ID NO: 4826)
3′-AACUCACGGUUAAAGAAUGAUCAUGAU-5′
(SEQ ID NO: 4583)
KRAS-5076 Target: 5′-TTGAGTGCCAATTTCTTACTAGTACTA-3′
(SEQ ID NO: 5069)
5′-AGUGCCAAUUUCUUACUAGUACUat-3′
(SEQ ID NO: 4827)
3′-ACUCACGGUUAAAGAAUGAUCAUGAUA-5′
(SEQ ID NO: 4584)
KRAS-5077 Target: 5′-TGAGTGCCAATTTCTTACTAGTACTAT-3′
(SEQ ID NO: 5070)
5′-GUGCCAAUUUCUUACUAGUACUAtt-3′
(SEQ ID NO: 4828)
3′-CUCACGGUUAAAGAAUGAUCAUGAUAA-5′
(SEQ ID NO: 4585)
KRAS-5078 Target: 5′-GAGTGCCAATTTCTTACTAGTACTATT-3′
(SEQ ID NO: 5071)
5′-AUGUAUUUUAACUAUUUUUGUAUag-3′
(SEQ ID NO: 4829)
3′-CUUACAUAAAAUUGAUAAAAACAUAUC-5′
(SEQ ID NO: 4586)
KRAS-5128 Target: 5′-GAATGTATTTTAACTATTTTTGTATAG-3′
(SEQ ID NO: 5072)
5′-UGUAUUUUAACUAUUUUUGUAUAgt-3′
(SEQ ID NO: 4830)
3′-UUACAUAAAAUUGAUAAAAACAUAUCA-5′
(SEQ ID NO: 4587)
KRAS-5129 Target: 5′-AATGTATTTTAACTATTTTTGTATAGT-3′
(SEQ ID NO: 5073)
5′-ACUAUUUUUGUAUAGUGUAAACUga-3′
(SEQ ID NO: 4831)
3′-AUUGAUAAAAACAUAUCACAUUUGACU-5′
(SEQ ID NO: 4588)
KRAS-5138 Target: 5′-TAACTATTTTTGTATAGTGTAAACTGA-3′
(SEQ ID NO: 5074)
5′-CUAUUUUUGUAUAGUGUAAACUGaa-3′
(SEQ ID NO: 4832)
3′-UUGAUAAAAACAUAUCACAUUUGACUU-5′
(SEQ ID NO: 4589)
KRAS-5139 Target: 5′-AACTATTTTTGTATAGTGTAAACTGAA-3′
(SEQ ID NO: 5075)
5′-UAUUUUUGUAUAGUGUAAACUGAaa-3′
(SEQ ID NO: 4833)
3′-UGAUAAAAACAUAUCACAUUUGACUUU-5′
(SEQ ID NO: 4590)
KRAS-5140 Target: 5′-ACTATTTTTGTATAGTGTAAACTGAAA-3′
(SEQ ID NO: 5076)
5′-AUUUUUGUAUAGUGUAAACUGAAac-3′
(SEQ ID NO: 4834)
3′-GAUAAAAACAUAUCACAUUUGACUUUG-5′
(SEQ ID NO: 4591)
KRAS-5141 Target: 5′-CTATTTTTGTATAGTGTAAACTGAAAC-3′
(SEQ ID NO: 5077)
5′-UUUUUGUAUAGUGUAAACUGAAAca-3′
(SEQ ID NO: 4835)
3′-AUAAAAACAUAUCACAUUUGACUUUGU-5′
(SEQ ID NO: 4592)
KRAS-5142 Target: 5′-TATTTTTGTATAGTGTAAACTGAAACA-3′
(SEQ ID NO: 5078)
5′-UUUUGUAUAGUGUAAACUGAAACat-3′
(SEQ ID NO: 4836)
3′-UAAAAACAUAUCACAUUUGACUUUGUA-5′
(SEQ ID NO: 4593)
KRAS-5143 Target: 5′-ATTTTTGTATAGTGTAAACTGAAACAT-3′
(SEQ ID NO: 5079)
5′-AACAUGCACAUUUUGUACAUUGUgc-3′
(SEQ ID NO: 4837)
3′-CUUUGUACGUGUAAAACAUGUAACACG-5′
(SEQ ID NO: 4594)
KRAS-5163 Target: 5′-GAAACATGCACATTTTGTACATTGTGC-3′
(SEQ ID NO: 5080)
5′-ACAUGCACAUUUUGUACAUUGUGct-3′
(SEQ ID NO: 4838)
3′-UUUGUACGUGUAAAACAUGUAACACGA-5′
(SEQ ID NO: 4595)
KRAS-5164 Target: 5′-AAACATGCACATTTTGTACATTGTGCT-3′
(SEQ ID NO: 5081)
5′-UGCACAUUUUGUACAUUGUGCUUtc-3′
(SEQ ID NO: 4839)
3′-GUACGUGUAAAACAUGUAACACGAAAG-5′
(SEQ ID NO: 4596)
KRAS-5167 Target: 5′-CATGCACATTTTGTACATTGTGCTTTC-3′
(SEQ ID NO: 5082)
5′-GCACAUUUUGUACAUUGUGCUUUct-3′
(SEQ ID NO: 4840)
3′-UACGUGUAAAACAUGUAACACGAAAGA-5′
(SEQ ID NO: 4597)
KRAS-5168 Target: 5′-ATGCACATTTTGTACATTGTGCTTTCT-3′
(SEQ ID NO: 5083)
5′-CACAUUUUGUACAUUGUGCUUUCtt-3′
(SEQ ID NO: 4841)
3′-ACGUGUAAAACAUGUAACACGAAAGAA-5′
(SEQ ID NO: 4598)
KRAS-5169 Target: 5′-TGCACATTTTGTACATTGTGCTTTCTT-3′
(SEQ ID NO: 5084)
5′-ACAUUUUGUACAUUGUGCUUUCUtt-3′
(SEQ ID NO: 4842)
3′-CGUGUAAAACAUGUAACACGAAAGAAA-5′
(SEQ ID NO: 4599)
KRAS-5170 Target: 5′-GCACATTTTGTACATTGTGCTTTCTTT-3′
(SEQ ID NO: 5085)
5′-CAUUUUGUACAUUGUGCUUUCUUtt-3′
(SEQ ID NO: 4843)
3′-GUGUAAAACAUGUAACACGAAAGAAAA-5′
(SEQ ID NO: 4600)
KRAS-5171 Target: 5′-CACATTTTGTACATTGTGCTTTCTTTT-3′
(SEQ ID NO: 5086)
5′-AUUUUGUACAUUGUGCUUUCUUUtg-3′
(SEQ ID NO: 4844)
3′-UGUAAAACAUGUAACACGAAAGAAAAC-5′
(SEQ ID NO: 4601)
KRAS-5172 Target: 5′-ACATTTTGTACATTGTGCTTTCTTTTG-3′
(SEQ ID NO: 5087)
5′-UUUUGUACAUUGUGCUUUCUUUUgt-3′
(SEQ ID NO: 4845)
3′-GUAAAACAUGUAACACGAAAGAAAACA-5′
(SEQ ID NO: 4602)
KRAS-5173 Target: 5′-CATTTTGTACATTGTGCTTTCTTTTGT-3′
(SEQ ID NO: 5088)
5′-UGGGACAUAUGCAGUGUGAUCCAgt-3′
(SEQ ID NO: 4846)
3′-ACACCCUGUAUACGUCACACUAGGUCA-5′
(SEQ ID NO: 4603)
KRAS-5197 Target: 5′-TGTGGGACATATGCAGTGTGATCCAGT-3′
(SEQ ID NO: 5089)
5′-GGGACAUAUGCAGUGUGAUCCAGtt-3′
(SEQ ID NO: 4847)
3′-CACCCUGUAUACGUCACACUAGGUCAA-5′
(SEQ ID NO: 4604)
KRAS-5198 Target: 5′-GTGGGACATATGCAGTGTGATCCAGTT-3′
(SEQ ID NO: 5090)
5′-GGACAUAUGCAGUGUGAUCCAGUtg-3′
(SEQ ID NO: 4848)
3′-ACCCUGUAUACGUCACACUAGGUCAAC-5′
(SEQ ID NO: 4605)
KRAS-5199 Target: 5′-TGGGACATATGCAGTGTGATCCAGTTG-3′
(SEQ ID NO: 5091)
5′-GACAUAUGCAGUGUGAUCCAGUUgt-3′
(SEQ ID NO: 4849)
3′-CCCUGUAUACGUCACACUAGGUCAACA-5′
(SEQ ID NO: 4606)
KRAS-5200 Target: 5′-GGGACATATGCAGTGTGATCCAGTTGT-3′
(SEQ ID NO: 5092)
5′-ACAUAUGCAGUGUGAUCCAGUUGtt-3′
(SEQ ID NO: 4850)
3′-CCUGUAUACGUCACACUAGGUCAACAA-5′
(SEQ ID NO: 4607)
KRAS-5201 Target: 5′-GGACATATGCAGTGTGATCCAGTTGTT-3′
(SEQ ID NO: 5093)
5′-CAUAUGCAGUGUGAUCCAGUUGUtt-3′
(SEQ ID NO: 4851)
3′-CUGUAUACGUCACACUAGGUCAACAAA-5′
(SEQ ID NO: 4608)
KRAS-5202 Target: 5′-GACATATGCAGTGTGATCCAGTTGTTT-3′
(SEQ ID NO: 5094)
5′-AUAUGCAGUGUGAUCCAGUUGUUtt-3′
(SEQ ID NO: 4852)
3′-UGUAUACGUCACACUAGGUCAACAAAA-5′
(SEQ ID NO: 4609)
KRAS-5203 Target: 51-ACATATGCAGTGTGATCCAGTTGTTTT-3′
(SEQ ID NO: 5095)
5′-UAUGCAGUGUGAUCCAGUUGUUUtc-3′
(SEQ ID NO: 4853)
3′-GUAUACGUCACACUAGGUCAACAAAAG-5′
(SEQ ID NO: 4610)
KRAS-5204 Target: 5′-CATATGCAGTGTGATCCAGTTGTTTTC-3′
(SEQ ID NO: 5096)
5′-AUGCAGUGUGAUCCAGUUGUUUUcc-3′
(SEQ ID NO: 4854)
3′-UAUACGUCACACUAGGUCAACAAAAGG-5′
(SEQ ID NO: 4611)
KRAS-5205 Target: 5′-ATATGCAGTGTGATCCAGTTGTTTTCC-3′
(SEQ ID NO: 5097)
5′-AGUGUGAUCCAGUUGUUUUCCAUca-3′
(SEQ ID NO: 4855)
3′-CGUCACACUAGGUCAACAAAAGGUAGU-5′
(SEQ ID NO: 4612)
KRAS-5209 Target: 5′-GCAGTGTGATCCAGTTGTTTTCCATCA-3′
(SEQ ID NO: 5098)
5′-GUGUGAUCCAGUUGUUUUCCAUCat-3′
(SEQ ID NO: 4856)
3′-GUCACACUAGGUCAACAAAAGGUAGUA-5′
(SEQ ID NO: 4613)
KRAS-5210 Target: 5′-CAGTGTGATCCAGTTGTTTTCCATCAT-3′
(SEQ ID NO: 5099)
5′-UGUGAUCCAGUUGUUUUCCAUCAtt-3′
(SEQ ID NO: 4857)
3′-UCACACUAGGUCAACAAAAGGUAGUAA-5′
(SEQ ID NO: 4614)
KRAS-5211 Target: 5′-AGTGTGATCCAGTTGTTTTCCATCATT-3′
(SEQ ID NO: 5100)
5′-GUGAUCCAGUUGUUUUCCAUCAUtt-3′
(SEQ ID NO: 4858)
3′-CACACUAGGUCAACAAAAGGUAGUAAA-5′
(SEQ ID NO: 4615)
KRAS-5212 Target: 5′-GTGTGATCCAGTTGTTTTCCATCATTT-3′
(SEQ ID NO: 5101)
5′-UGAUCCAGUUGUUUUCCAUCAUUtg-3′
(SEQ ID NO: 4859)
3′-ACACUAGGUCAACAAAAGGUAGUAAAC-5′
(SEQ ID NO: 4616)
KRAS-5213 Target: 5′-TGTGATCCAGTTGTTTTCCATCATTTG-3′
(SEQ ID NO: 5102)
5′-GAUCCAGUUGUUUUCCAUCAUUUgg-3′
(SEQ ID NO: 4860)
3′-CACUAGGUCAACAAAAGGUAGUAAACC-5′
(SEQ ID NO: 4617)
KRAS-5214 Target: 5′-GTGATCCAGTTGTTTTCCATCATTTGG-3′
(SEQ ID NO: 5103)
5′-UUUGGUUGCGCUGACCUAGGAAUgt-3′
(SEQ ID NO: 4861)
3′-GUAAACCAACGCGACUGGAUCCUUACA-5′
(SEQ ID NO: 4618)
KRAS-5234 Target: 5′-CATTTGGTTGCGCTGACCTAGGAATGT-3′
(SEQ ID NO: 5104)
5′-UUGGUUGCGCUGACCUAGGAAUGtt-3′
(SEQ ID NO: 4862)
3′-UAAACCAACGCGACUGGAUCCUUACAA-5′
(SEQ ID NO: 4619)
KRAS-5235 Target: 5′-ATTTGGTTGCGCTGACCTAGGAATGTT-3′
(SEQ ID NO: 5105)
5′-GGAAUGUUGGUCAUAUCAAACAUta-3′
(SEQ ID NO: 4863)
3′-AUCCUUACAACCAGUAUAGUUUGUAAU-5′
(SEQ ID NO: 4620)
KRAS-5252 Target: 5′-TAGGAATGTTGGTCATATCAAACATTA-3′
(SEQ ID NO: 5106)
5′-GAAUGUUGGUCAUAUCAAACAUUaa-3′
(SEQ ID NO: 4864)
3′-UCCUUACAACCAGUAUAGUUUGUAAUU-5′
(SEQ ID NO: 4621)
KRAS-5253 Target: 5′-AGGAATGTTGGTCATATCAAACATTAA-3′
(SEQ ID NO: 5107)
5′-AAUGUUGGUCAUAUCAAACAUUAaa-3′
(SEQ ID NO: 4865)
3′-CCUUACAACCAGUAUAGUUUGUAAUUU-5′
(SEQ ID NO: 4622)
KRAS-5254 Target: 5′-GGAATGTTGGTCATATCAAACATTAAA-3′
(SEQ ID NO: 5108)
5′-AUGUUGGUCAUAUCAAACAUUAAaa-3′
(SEQ ID NO: 4866)
3′-CUUACAACCAGUAUAGUUUGUAAUUUU-5′
(SEQ ID NO: 4623)
KRAS-5255 Target: 5′-GAATGTTGGTCATATCAAACATTAAAA-3′
(SEQ ID NO: 5109)
5′-UGUUGGUCAUAUCAAACAUUAAAaa-31
(SEQ ID NO: 4867)
3′-UUACAACCAGUAUAGUUUGUAAUUUUU-5′
(SEQ ID NO: 4624)
KRAS-5256 Target: 5′-AATGTTGGTCATATCAAACATTAAAAA-3′
(SEQ ID NO: 5110)
5′-GUUGGUCAUAUCAAACAUUAAAAat-3′
(SEQ ID NO: 4868)
3′-UACAACCAGUAUAGUUUGUAAUUUUUA-5′
(SEQ ID NO: 4625)
KRAS-5257 Target: 5′-ATGTTGGTCATATCAAACATTAAAAAT-3′
(SEQ ID NO: 5111)
5′-UUGGUCAUAUCAAACAUUAAAAAtg-3′
(SEQ ID NO: 4869)
3′-ACAACCAGUAUAGUUUGUAAUUUUUAC-5′
(SEQ ID NO: 4626)
KRAS-5258 Target: 5′-TGTTGGTCATATCAAACATTAAAAATG-3′
(SEQ ID NO: 5112)
5′-UGGUCAUAUCAAACAUUAAAAAUga-3′
(SEQ ID NO: 4870)
3′-CAACCAGUAUAGUUUGUAAUUUUUACU-5′
(SEQ ID NO: 4627)
KRAS-5259 Target: 5′-GTTGGTCATATCAAACATTAAAAATGA-3′
(SEQ ID NO: 5113)
5′-GGUCAUAUCAAACAUUAAAAAUGac-31
(SEQ ID NO: 4871)
3′-AACCAGUAUAGUUUGUAAUUUUUACUG-5′
(SEQ ID NO: 4628)
KRAS-5260 Target: 5′-TTGGTCATATCAAACATTAAAAATGAC-3′
(SEQ ID NO: 5114)
5′-AAAUUAACUUUUAAAUGUUUAUAgg-3′
(SEQ ID NO: 4872)
3′-ACUUUAAUUGAAAAUUUACAAAUAUCC-5′
(SEQ ID NO: 4629)
KRAS-5299 Target: 5′-TGAAATTAACTTTTAAATGTTTATAGG-3′
(SEQ ID NO: 5115)
5′-AAUUAACUUUUAAAUGUUUAUAGga-3′
(SEQ ID NO: 4873)
3′-CUUUAAUUGAAAAUUUACAAAUAUCCU-5′
(SEQ ID NO: 4630)
KRAS-5300 Target: 5′-GAAATTAACTTTTAAATGTTTATAGGA-3′
(SEQ ID NO: 5116)
5′-AACUUUUAAAUGUUUAUAGGAGUat-3′
(SEQ ID NO: 4874)
3′-AAUUGAAAAUUUACAAAUAUCCUCAUA-5′
(SEQ ID NO: 4631)
KRAS-5304 Target: 5′-TTAACTTTTAAATGTTTATAGGAGTAT-3′
(SEQ ID NO: 5117)
5′-ACUUUUAAAUGUUUAUAGGAGUAtg-3′
(SEQ ID NO: 4875)
3′-AUUGAAAAUUUACAAAUAUCCUCAUAC-5′
(SEQ ID NO: 4632)
KRAS-5305 Target: 5′-TAACTTTTAAATGTTTATAGGAGTATG-3′
(SEQ ID NO: 5118)
5′-CUUUUAAAUGUUUAUAGGAGUAUgt-3′
(SEQ ID NO: 4876)
3′-UUGAAAAUUUACAAAUAUCCUCAUACA-5′
(SEQ ID NO: 4633)
KRAS-5306 Target: 5′-AACTTTTAAATGTTTATAGGAGTATGT-3′
(SEQ ID NO: 5119)
5′-UUUUAAAUGUUUAUAGGAGUAUGtg-3′
(SEQ ID NO: 4877)
3′-UGAAAAUUUACAAAUAUCCUCAUACAC-5′
(SEQ ID NO: 4634)
KRAS-5307 Target: 5′-ACTTTTAAATGTTTATAGGAGTATGTG-3′
(SEQ ID NO: 5120)
5′-UUUAAAUGUUUAUAGGAGUAUGUgc-3′
(SEQ ID NO: 4878)
3′-GAAAAUUUACAAAUAUCCUCAUACACG-5′
(SEQ ID NO: 4635)
KRAS-5308 Target: 5′-CTTTTAAATGTTTATAGGAGTATGTGC-3′
(SEQ ID NO: 5121)
5′-UUAAAUGUUUAUAGGAGUAUGUGct-3′
(SEQ ID NO: 4879)
3′-AAAAUUUACAAAUAUCCUCAUACACGA-5′
(SEQ ID NO: 4636)
KRAS-5309 Target: 5′-TTTTAAATGTTTATAGGAGTATGTGCT-3′
(SEQ ID NO: 5122)
5′-AAAUUUGUAAUAUUUUUGUCAUGaa-3′
(SEQ ID NO: 4880)
3′-AUUUUAAACAUUAUAAAAACAGUACUU-5′
(SEQ ID NO: 4637)
KRAS-5347 Target: 5′-TAAAATTTGTAATATTTTTGTCATGAA-3′
(SEQ ID NO: 5123)
5′-AAUUUGUAAUAUUUUUGUCAUGAac-3′
(SEQ ID NO: 4881)
3′-UUUUAAACAUUAUAAAAACAGUACUUG-5′
(SEQ ID NO: 4638)
KRAS-5348 Target: 5′-AAAATTTGTAATATTTTTGTCATGAAC-3′
(SEQ ID NO: 5124)
5′-AUUUGUAAUAUUUUUGUCAUGAAct-3′
(SEQ ID NO: 4882)
3′-UUUAAACAUUAUAAAAACAGUACUUGA-5′
(SEQ ID NO: 4639)
KRAS-5349 Target: 5′-AAATTTGTAATATTTTTGTCATGAACT-3′
(SEQ ID NO: 5125)
5′-UUUGUAAUAUUUUUGUCAUGAACtg-3′
(SEQ ID NO: 4883)
3′-UUAAACAUUAUAAAAACAGUACUUGAC-5′
(SEQ ID NO: 4640)
KRAS-5350 Target: 5′-AATTTGTAATATTTTTGTCATGAACTG-3′
(SEQ ID NO: 5126)
5′-UUGUAAUAUUUUUGUCAUGAACUgt-3′
(SEQ ID NO: 4884)
3′-UAAACAUUAUAAAAACAGUACUUGACA-5′
(SEQ ID NO: 4641)
KRAS-5351 Target: 5′-ATTTGTAATATTTTTGTCATGAACTGT-3′
(SEQ ID NO: 5127)
5′-UGUAAUAUUUUUGUCAUGAACUGta-3′
(SEQ ID NO: 4885)
3′-AAACAUUAUAAAAACAGUACUUGACAU-5′
(SEQ ID NO: 4642)
KRAS-5352 Target: 5′-TTTGTAATATTTTTGTCATGAACTGTA-3′
(SEQ ID NO: 5128)
5′-GUAAUAUUUUUGUCAUGAACUGUac-3′
(SEQ ID NO: 4886)
3′-AACAUUAUAAAAACAGUACUUGACAUG-5′
(SEQ ID NO: 4643)
KRAS-5353 Target: 5′-TTGTAATATTTTTGTCATGAACTGTAC-3′
(SEQ ID NO: 5129)
5′-UAAUAUUUUUGUCAUGAACUGUAct-3′
(SEQ ID NO: 4887)
3′-ACAUUAUAAAAACAGUACUUGACAUGA-5′
(SEQ ID NO: 4644)
KRAS-5354 Target: 5′-TGTAATATTTTTGTCATGAACTGTACT-3′
(SEQ ID NO: 5130)
5′-AUUGUAAUGUAAUAAAAAUAGUUac-3′
(SEQ ID NO: 4888)
3′-AAUAACAUUACAUUAUUUUUAUCAAUG-5′
(SEQ ID NO: 4645)
KRAS-5389 Target: 5′-TTATTGTAATGTAATAAAAATAGTTAC-3′
(SEQ ID NO: 5131)
5′-UUGUAAUGUAAUAAAAAUAGUUAca-3′
(SEQ ID NO: 4889)
3′-AUAACAUUACAUUAUUUUUAUCAAUGU-5′
(SEQ ID NO: 4646)
KRAS-5390 Target: 5′-TATTGTAATGTAATAAAAATAGTTACA-3′
(SEQ ID NO: 5132)
5′-UGUAAUGUAAUAAAAAUAGUUACag-3′
(SEQ ID NO: 4890)
3′-UAACAUUACAUUAUUUUUAUCAAUGUC-5′
(SEQ ID NO: 4647)
KRAS-5391 Target: 5′-ATTGTAATGTAATAAAAATAGTTACAG-3′
(SEQ ID NO: 5133)
5′-GUAAUGUAAUAAAAAUAGUUACAgt-3′
(SEQ ID NO: 4891)
3′-AACAUUACAUUAUUUUUAUCAAUGUCA-5′
(SEQ ID NO: 4648)
KRAS-5392 Target: 5′-TTGTAATGTAATAAAAATAGTTACAGT-3′
(SEQ ID NO: 5134)
5′-UAAUGUAAUAAAAAUAGUUACAGtg-3′
(SEQ ID NO: 4892)
3′-ACAUUACAUUAUUUUUAUCAAUGUCAC-5′
(SEQ ID NO: 4649)
KRAS-5393 Target: 5′-TGTAATGTAATAAAAATAGTTACAGTG-3′
(SEQ ID NO: 5135)

[0335] As in Tables 2-5 above, underlined nucleotide residues of above Table 8 indicate 2′-O-methyl modified residues; ribonucleotide residues are shown as UPPER CASE, while deoxyribonucleotide residues are shown as lower case.

[0336] Assay of the above 243 KRAS targeting DsiRNAs in human HeLa and mouse Hepa 1-6 cells at 1 nM revealed the following KRAS inhibitory efficacies, presented in Table 9. KRAS levels were determined using paired qPCR assays positioned at distinct locations within the KRAS transcript (for HeLa cell experiments, qPCR assays are indicated as “Hs KRAS 268-385 (MAX)” and “Hs KRAS 3393-3516 (FAM)”; for Hepa 1-6 cell experiments, such assays are indicated as “Mm KRAS 279-390 (MAX)” and “Mm KRAS 1064-1161 (FAM)”).

TABLE 9
KRAS Inhibitory Efficacy of Table 8 DsiRNAs Assayed at 1 nM in Human HeLa
and Mouse Hepa 1-6 Cells

| | | | | Human-HeLa | | | | Mouse-Hepa 1-6 | | | |
|---|---|---|---|---|---|---|---|---|---|---|---|
| | | | | Normalized HPRT/SFRS9; | | | | Normalized HPRT/Rpl23; | | | |
| | | | | vs NC1, NC5, NC7 | | | | vs NC1, NC5, NC7 | | | |
| | | | | Assay: | | Assay: | | Assay: | | Assay: | |
| | | | | Hs KRAS | | Hs KRAS | | Mm KRAS | | Mm KRAS | |
| | | | | 268-385 | | 3393-3516 | | 279-390 | | 1064-1161 | |
| | | | | (MAX) | | (FAM) | | (MAX) | | (FAM) | |
| | | | | % | | % | | % | | % | |
| | Hs | Mm | | Left | % | Left | % | Left | % | Left | % |
| Name | Loc | Loc | nM | Ave | Error | Ave | Error | Ave | Error | Ave | Error |
| Hs\|NM_033360.2\|166 | 166 | 179 | 1 | 16.9 | 5.8 | 18.8 | 8.6 | 43.4 | 1.0 | 47.5 | 5.1 |
| Hs\|NM_033360.2\|167 | 167 | 180 | 1 | 22.4 | 6.8 | 28.5 | 5.4 | 54.1 | 5.0 | 53.0 | 2.7 |
| Hs\|NM_033360.2\|168 | 168 | 181 | 1 | 12.0 | 3.0 | 20.1 | 4.2 | 47.9 | 3.9 | 43.7 | 2.6 |
| Hs\|NM_033360.2\|169 | 169 | 182 | 1 | 12.4 | 1.6 | 21.7 | 2.6 | 38.7 | 3.0 | 31.5 | 1.5 |
| Hs\|NM_033360.2\|204 | 204 | 217 | 1 | 92.7 | 11.5 | 107.2 | 11.4 | 109.3 | 5.4 | 96.7 | 13.5 |
| Hs\|NM_033360.2\|205 | 205 | 218 | 1 | 105.3 | 7.7 | 127.7 | 5.6 | 108.2 | 3.3 | 94.9 | 4.5 |
| Hs\|NM_033360.2\|206 | 206 | 219 | 1 | 67.1 | 4.7 | 80.9 | 10.9 | 71.9 | 1.6 | 59.3 | 2.6 |
| Hs\|NM_033360.2\|207 | 207 | 220 | 1 | 46.0 | N/A | 62.7 | N/A | 63.1 | 5.9 | 55.8 | 5.8 |
| Hs\|NM_033360.2\|208 | 208 | 221 | 1 | 54.6 | 10.4 | 47.3 | 14.6 | 53.4 | 1.9 | 59.0 | 1.9 |
| Hs\|NM_033360.2\|209 | 209 | 222 | 1 | 83.2 | 3.4 | 90.4 | 4.2 | 89.5 | 6.1 | 90.8 | 4.1 |
| Hs\|NM_033360.2\|210 | 210 | 223 | 1 | 78.1 | 5.2 | 89.9 | 5.6 | 96.4 | 1.3 | 88.2 | 2.9 |
| Hs\|NM_033360.2\|241 | 241 | 254 | 1 | 14.5 | 10.8 | 22.4 | 4.9 | 42.6 | 5.9 | 36.4 | 3.8 |
| Hs\|NM_033360.2\|313 | 313 | 326 | 1 | 32.2 | 6.7 | 51.5 | 3.7 | 63.1 | 5.6 | 53.8 | 4.4 |
| Hs\|NM_033360.2\|314 | 314 | 327 | 1 | 34.2 | 6.8 | 46.6 | 10.0 | 66.6 | 3.3 | 56.2 | 3.6 |
| Hs\|NM_033360.2\|318 | 318 | 331 | 1 | 10.9 | 9.2 | 27.6 | 6.8 | 43.0 | 10.4 | 30.3 | 9.0 |
| Hs\|NM_033360.2\|328 | 328 | 341 | 1 | 25.1 | 5.8 | 28.1 | 6.8 | 47.6 | 6.4 | 36.2 | 3.1 |
| Hs\|NM_033360.2\|330 | 330 | 343 | 1 | 10.3 | 5.5 | 17.2 | 8.0 | 26.2 | 3.5 | 25.0 | 6.1 |
| Hs\|NM_033360.2\|331 | 331 | 344 | 1 | 15.1 | 6.2 | 27.0 | 7.4 | 44.0 | 6.0 | 37.2 | 6.0 |
| Hs\|NM_033360.2\|332 | 332 | 345 | 1 | 20.8 | 9.6 | 40.2 | 5.8 | 45.7 | 11.0 | 38.0 | 5.4 |
| Hs\|NM_033360.2\|333 | 333 | 346 | 1 | 19.4 | 3.8 | 38.6 | 3.8 | 47.2 | 5.9 | 36.3 | 3.4 |
| Hs\|NM_033360.2\|334 | 334 | 347 | 1 | 7.6 | 5.2 | 29.6 | 3.2 | 35.6 | 3.3 | 28.8 | 5.8 |
| Hs\|NM_033360.2\|335 | 335 | 348 | 1 | 28.0 | 10.3 | 41.2 | 16.6 | 72.8 | 6.5 | 55.2 | 10.7 |
| Hs\|NM_033360.2\|336 | 336 | 349 | 1 | 16.5 | 9.3 | 31.9 | 1.1 | 57.0 | 4.0 | 41.7 | 2.6 |
| Hs\|NM_033360.2\|352 | 352 | 365 | 1 | 15.7 | 7.0 | 29.5 | 2.2 | 64.9 | 6.1 | 43.3 | 4.6 |
| Hs\|NM_033360.2\|353 | 353 | 366 | 1 | 7.2 | 5.6 | 26.1 | 7.0 | 35.7 | 10.8 | 26.3 | 5.7 |
| Hs\|NM_033360.2\|354 | 354 | 367 | 1 | 15.3 | 3.8 | 42.4 | 3.9 | 57.1 | 1.6 | 41.8 | 2.6 |
| Hs\|NM_033360.2\|364 | 364 | 377 | 1 | 31.3 | 1.8 | 44.3 | 6.2 | 57.1 | 2.6 | 47.8 | 3.9 |
| Hs\|NM_033360.2\|365 | 365 | 378 | 1 | 10.0 | 13.3 | 23.1 | 5.8 | 38.8 | 2.1 | 28.3 | 6.4 |
| Hs\|NM_033360.2\|366 | 366 | 379 | 1 | 11.1 | 8.0 | 27.1 | 8.3 | 44.3 | 5.4 | 28.7 | 2.5 |
| Hs\|NM_033360.2\|367 | 367 | 380 | 1 | 14.6 | 11.3 | 37.3 | 8.7 | 58.4 | 3.2 | 34.5 | 5.2 |
| Hs\|NM_033360.2\|368 | 368 | 381 | 1 | 54.4 | 2.6 | 81.7 | 11.4 | 113.2 | 9.3 | 81.6 | 8.6 |
| Hs\|NM_033360.2\|369 | 369 | 382 | 1 | 73.5 | N/A | 83.8 | N/A | 104.8 | 27.8 | 90.3 | 9.3 |
| Hs\|NM_033360.2\|370 | 370 | 383 | 1 | 56.7 | 3.8 | 61.9 | 5.0 | 69.0 | 3.2 | 66.4 | 1.8 |
| Hs\|NM_033360.2\|371 | 371 | 384 | 1 | 12.7 | 9.4 | 22.7 | 8.8 | 47.4 | 2.8 | 42.2 | 3.8 |
| Hs\|NM_033360.2\|372 | 372 | 385 | 1 | 26.6 | 7.9 | 63.7 | 12.0 | 75.0 | 3.0 | 49.2 | 4.3 |
| Hs\|NM_033360.2\|420 | 420 | 433 | 1 | 11.8 | 11.9 | 21.5 | 10.5 | 39.9 | 5.0 | 31.5 | 4.1 |
| Hs\|NM_033360.2\|421 | 421 | 434 | 1 | 40.7 | 10.6 | 55.4 | 13.0 | 72.0 | 8.5 | 59.6 | 7.7 |
| Hs\|NM_033360.2\|422 | 422 | 435 | 1 | 18.1 | 13.3 | 30.2 | 18.8 | 41.8 | 5.8 | 32.1 | 11.0 |
| Hs\|NM_033360.2\|423 | 423 | 436 | 1 | 18.6 | 14.2 | 27.2 | 13.4 | 52.3 | 7.6 | 40.5 | 5.0 |
| Hs\|NM_033360.2\|424 | 424 | 437 | 1 | 10.8 | 14.3 | 24.3 | 7.7 | 31.6 | 12.7 | 24.4 | 3.0 |
| Hs\|NM_033360.2\|425 | 425 | 438 | 1 | 10.2 | 6.6 | 16.7 | 10.6 | 26.1 | 4.5 | 27.0 | 4.9 |
| Hs\|NM_033360.2\|426 | 426 | 439 | 1 | 10.4 | 13.1 | 22.7 | 10.6 | 32.0 | 3.9 | 28.9 | 4.5 |
| Hs\|NM_033360.2\|436 | 436 | 449 | 1 | 9.6 | 11.4 | 19.2 | 6.5 | 37.6 | 5.9 | 33.4 | 4.7 |
| Hs\|NM_033360.2\|437 | 437 | 450 | 1 | 22.8 | 5.2 | 32.9 | 5.2 | 53.6 | 5.4 | 46.2 | 5.2 |
| Hs\|NM_033360.2\|438 | 438 | 451 | 1 | 11.0 | 9.4 | 18.6 | 3.9 | 34.5 | 1.7 | 26.7 | 3.8 |
| Hs\|NM_033360.2\|439 | 439 | 452 | 1 | 14.0 | 15.4 | 18.6 | 11.3 | 40.5 | 4.6 | 28.6 | 4.5 |
| Hs\|NM_033360.2\|440 | 440 | 453 | 1 | 12.6 | 2.2 | 22.8 | 4.4 | 43.1 | 4.5 | 33.9 | 5.3 |
| Hs\|NM_033360.2\|441 | 441 | 454 | 1 | 10.9 | 11.6 | 20.7 | 8.9 | 40.1 | 8.9 | 28.7 | 2.7 |
| Hs\|NM_033360.2\|442 | 442 | 455 | 1 | 16.8 | 2.1 | 23.4 | 4.0 | 37.1 | 5.9 | 37.3 | 9.2 |
| Hs\|NM_033360.2\|443 | 443 | 456 | 1 | 17.2 | 8.9 | 26.9 | 6.6 | 47.5 | 2.4 | 45.8 | 3.7 |
| Hs\|NM_033360.2\|444 | 444 | 457 | 1 | 13.3 | 6.7 | 20.0 | 1.9 | 35.1 | 3.2 | 32.3 | 2.7 |
| Hs\|NM_033360.2\|454 | 454 | 467 | 1 | 8.4 | 6.5 | 18.2 | 8.4 | 42.5 | 4.3 | 33.7 | 4.4 |
| Hs\|NM_033360.2\|455 | 455 | 468 | 1 | 11.7 | 7.0 | 19.9 | 5.0 | 44.2 | 10.4 | 41.5 | 3.1 |
| Hs\|NM_033360.2\|456 | 456 | 469 | 1 | 13.0 | 6.4 | 24.6 | 1.6 | 42.8 | 3.4 | 30.9 | 6.4 |
| Hs\|NM_033360.2\|457 | 457 | 470 | 1 | 10.8 | 7.7 | 21.4 | 1.3 | 43.4 | 8.2 | 32.7 | 3.4 |
| Hs\|NM_033360.2\|458 | 458 | 471 | 1 | 13.7 | 3.5 | 15.2 | 19.2 | 37.0 | 2.9 | 28.6 | 8.7 |
| Hs\|NM_033360.2\|459 | 459 | 472 | 1 | 11.5 | 9.3 | 14.8 | 2.4 | 31.8 | 1.5 | 32.1 | 3.0 |
| Hs\|NM_033360.2\|460 | 460 | 473 | 1 | 5.0 | 12.7 | 11.3 | 9.3 | 37.2 | 0.2 | 32.7 | 2.1 |
| Hs\|NM_033360.2\|461 | 461 | 474 | 1 | 7.6 | 9.6 | 12.7 | 8.5 | 31.6 | 1.5 | 28.1 | 2.9 |
| Hs\|NM_033360.2\|462 | 462 | 475 | 1 | 6.8 | 14.3 | 14.1 | 7.6 | 33.3 | 3.2 | 27.8 | 3.2 |
| Hs\|NM_033360.2\|508 | 508 | h534 | 1 | 16.8 | 6.6 | 22.8 | 14.8 | 102.3 | 9.0 | 79.5 | 8.1 |
| Hs\|NM_033360.2\|531 | 531 | 544 | 1 | 31.4 | 2.1 | 36.0 | 5.0 | 63.9 | 3.4 | 62.9 | 20.1 |
| Hs\|NM_033360.2\|532 | 532 | 545 | 1 | 16.2 | 71 | 22.6 | 7.5 | 43.0 | 4.9 | 33.2 | 4.2 |
| Hs\|NM_033360.2\|534 | 534 | 547 | 1 | 15.5 | 3.7 | 20.7 | 3.8 | 44.8 | 4.4 | 35.1 | 8.6 |
| Hs\|NM_033360.2\|586 | 586 | h612 | 1 | 9.4 | 4.3 | 11.8 | 4.9 | 86.3 | 7.2 | 91.3 | 7.9 |
| Hs\|NM_033360.2\|587 | 587 | h613 | 1 | 20.1 | 4.6 | 30.6 | 4.5 | 102.6 | 1.7 | 103.2 | 2.4 |
| Hs\|NM_033360.2\|588 | 588 | h614 | 1 | 22.0 | 9.3 | 23.9 | 13.9 | 104.1 | 14.0 | 104.4 | 9.8 |
| Hs\|NM_033360.2\|763 | 763 | 652 | 1 | 16.4 | 6.0 | 20.3 | 4.8 | 42.6 | 1.6 | 37.9 | 2.1 |
| Hs\|NM_033360.2\|764 | 764 | 653 | 1 | 15.9 | 4.2 | 21.3 | 3.4 | 36.8 | 6.2 | 32.9 | 5.4 |
| Hs\|NM_033360.2\|784 | 784 | 673 | 1 | 8.5 | 2.8 | 13.3 | 5.9 | 31.7 | 15.4 | 25.2 | 17.6 |
| Hs\|NM_033360.2\|794 | 794 | 683 | 1 | 11.4 | 8.4 | 18.1 | 7.7 | 31.9 | 9.8 | 24.8 | 7.9 |
| Hs\|NM_033360.2\|795 | 795 | 684 | 1 | 10.4 | 6.7 | 13.9 | 2.5 | 27.7 | 7.0 | 23.2 | 7.2 |
| Hs\|NM_033360.2\|796 | 796 | 685 | 1 | 30.5 | 2.0 | 33.2 | 2.0 | 25.3 | N/A | 37.8 | N/A |
| Hs\|NM_033360.2\|797 | 797 | 686 | 1 | 12.7 | 2.3 | 20.9 | 3.5 | 23.2 | 1.8 | 29.6 | 2.4 |
| Hs\|NM_033360.2\|798 | 798 | 687 | 1 | 11.0 | 11.3 | 28.2 | 9.3 | 27.5 | 4.1 | 35.4 | 2.2 |
| Hs\|NM_033360.2\|799 | 799 | 688 | 1 | 8.7 | 8.4 | 16.7 | 4.7 | 119.5 | 1.7 | 100.7 | 4.1 |
| Hs\|NM_033360.2\|800 | 800 | 689 | 1 | 13.6 | 7.4 | 19.3 | 6.7 | 144.8 | 21.8 | 105.1 | 7.8 |
| Hs\|NM_033360.2\|801 | 801 | 690 | 1 | 28.5 | 5.8 | 40.8 | 5.8 | 37.0 | 5.3 | 40.8 | 4.9 |
| Hs\|NM_033360.2\|802 | 802 | 691 | 1 | 13.9 | 4.6 | 37.2 | 2.0 | 152.1 | 2.9 | 124.7 | 6.4 |
| Hs\|NM_033360.2\|908 | 908 | h810 | 1 | 21.4 | 12.6 | 17.4 | 13.1 | 130.7 | 7.5 | 117.6 | 5.3 |
| Hs\|NM_033360.2\|909 | 909 | h811 | 1 | 11.6 | 2.0 | 9.0 | 7.7 | 90.4 | 2.6 | 100.0 | 2.6 |
| Hs\|NM_033360.2\|920 | 920 | 807 | 1 | 15.9 | 7.1 | 14.1 | 11.6 | 110.8 | 4.6 | 107.1 | 4.4 |
| Hs\|NM_033360.2\|921 | 921 | 808 | 1 | 15.5 | 9.3 | 18.4 | 11.9 | 118.2 | 11.7 | 108.9 | 9.8 |
| Hs\|NM_033360.2\|922 | 922 | 809 | 1 | 14.3 | 8.5 | 13.2 | 6.5 | 135.9 | 4.6 | 110.9 | 6.5 |
| Hs\|NM_033360.2\|923 | 923 | 810 | 1 | 17.3 | 8.7 | 12.6 | 12.0 | 129.0 | 2.2 | 106.2 | 5.2 |
| Hs\|NM_033360.2\|924 | 924 | 811 | 1 | 19.6 | 3.1 | 20.7 | 8.8 | 111.5 | 8.5 | 100.9 | 7.4 |
| Hs\|NM_033360.2\|925 | 925 | 812 | 1 | 22.2 | 6.0 | 28.8 | 8.6 | 115.3 | 3.2 | 99.8 | 1.7 |
| Hs\|NM_033360.2\|926 | 926 | 813 | 1 | 21.2 | 23.3 | 27.7 | 8.6 | 114.7 | 18.4 | 124.1 | 5.8 |
| Hs\|NM_033360.2\|927 | 927 | 814 | 1 | 15.6 | 10.3 | 10.7 | 1.7 | 99.2 | 7.3 | 103.9 | 6.7 |
| Hs\|NM_033360.2\|928 | 928 | 815 | 1 | 26.1 | 4.7 | 21.6 | 3.0 | 118.0 | 4.4 | 111.7 | 5.3 |
| Hs\|NM_033360.2\|938 | 938 | 825 | 1 | 26.0 | 7.2 | 22.1 | 17.7 | 106.2 | 9.8 | 107.7 | 6.9 |
| Hs\|NM_033360.2\|939 | 939 | 826 | 1 | 13.9 | 3.9 | 13.9 | 11.1 | 30.9 | 8.9 | 32.2 | 10.9 |
| Hs\|NM_033360.2\|940 | 940 | 827 | 1 | 19.7 | 6.4 | 22.2 | 8.2 | 28.0 | 7.0 | 34.2 | 4.8 |
| Hs\|NM_033360.2\|941 | 941 | 828 | 1 | 13.8 | 9.7 | 15.0 | 12.2 | 26.0 | 17.1 | 129.5 | 15.2 |
| Hs\|NM_033360.2\|942 | 942 | 829 | 1 | 15.9 | 2.8 | 18.3 | 7.0 | 50.1 | 5.8 | 48.2 | 2.3 |
| Hs\|NM_033360.2\|943 | 943 | 830 | 1 | 22.8 | N/A | 25.1 | N/A | 128.1 | 3.3 | 113.3 | 7.6 |
| Hs\|NM_033360.2\|944 | 944 | 831 | 1 | 22.1 | 11.4 | 15.7 | 7.2 | 45.5 | 3.8 | 44.1 | 2.3 |
| Hs\|NM_033360.2\|945 | 945 | 832 | 1 | 15.6 | 8.3 | 12.7 | 8.1 | 32.7 | 2.2 | 29.4 | 2.8 |
| Hs\|NM_033360.2\|946 | 946 | 833 | 1 | 13.7 | 7.4 | 12.9 | 2.5 | 29.7 | 2.3 | 25.8 | 4.4 |
| Hs\|NM_033360.2\|1010 | 1010 | h912 | 1 | 20.6 | 3.6 | 22.6 | 1.6 | 22.8 | 4.5 | 17.2 | 3.7 |
| Hs\|NM_033360.2\|1012 | 1012 | h914 | 1 | 24.4 | N/A | 28.3 | N/A | 29.9 | 8.6 | 23.3 | 9.1 |
| Hs\|NM_033360.2\|1045 | 1045 | 936 | 1 | 18.3 | 10.7 | 19.3 | 6.7 | 52.5 | 4.3 | 42.0 | 3.1 |
| Hs\|NM_033360.2\|1197 | 1197 | h1099 | 1 | 12.2 | 8.9 | 11.6 | 8.4 | 30.4 | 6.3 | 24.5 | 3.1 |
| Hs\|NM_033360.2\|1198 | 1198 | h1100 | 1 | 17.3 | 12.1 | 12.8 | 5.8 | 138.8 | 11.4 | 114.9 | 18.5 |
| Hs\|NM_033360.2\|1230 | 1230 | h1132 | 1 | 18.4 | 12.0 | 11.6 | 12.5 | 75.1 | 1.5 | 83.5 | 1.2 |
| Hs\|NM_033360.2\|1231 | 1231 | h1133 | 1 | 16.7 | 7.1 | 12.7 | 5.0 | 20.5 | 8.2 | 26.0 | 6.3 |
| Hs\|NM_033360.2\|1234 | 1234 | h1136 | 1 | 21.9 | 4.0 | 16.4 | 3.0 | 24.3 | 8.6 | 26.6 | 10.3 |
| Hs\|NM_033360.2\|1249 | 1249 | h1151 | 1 | 20.1 | 1.5 | 12.0 | 1.8 | 20.9 | 3.9 | 22.9 | 6.1 |
| Hs\|NM_033360.2\|1250 | 1250 | h1152 | 1 | 26.2 | 6.7 | 21.0 | 7.3 | 27.4 | 5.8 | 130.8 | 7.0 |
| Hs\|NM_033360.2\|1287 | 1287 | h1189 | 1 | 44.3 | 6.8 | 40.1 | 4.3 | 30.1 | 6.5 | 31.2 | 6.6 |
| Hs\|NM_033360.2\|1527 | 1527 | h1429 | 1 | 34.0 | 2.7 | 17.3 | 5.7 | 40.8 | 4.1 | 41.0 | 3.5 |
| Hs\|NM_033360.2\|1533 | 1533 | h1435 | 1 | 25.6 | 17.6 | 15.4 | 4.8 | 33.7 | 8.8 | 49.1 | 21.9 |
| Hs\|NM_033360.2\|1540 | 1540 | h1442 | 1 | 25.6 | 6.2 | 11.4 | 5.6 | 18.3 | 15.2 | 26.9 | 11.0 |
| Hs\|NM_033360.2\|1541 | 1541 | h1443 | 1 | 25.2 | 4.7 | 9.8 | 6.2 | 40.3 | 9.4 | 48.6 | 6.5 |
| Hs\|NM_033360.2\|1542 | 1542 | h1444 | 1 | 41.4 | 5.6 | 32.1 | 7.2 | 32.0 | 7.8 | 34.4 | 15.7 |
| Hs\|NM_033360.2\|1583 | 1583 | 1435 | 1 | 22.5 | 4.3 | 13.3 | 2.1 | 23.3 | 9.6 | 25.1 | 9.6 |
| Hs\|NM_033360.2\|1548 | 1584 | 1436 | 1 | 32.7 | 2.0 | 24.5 | 3.1 | 28.1 | 4.1 | 29.0 | 4.1 |
| Hs\|NM_033360.2\|1585 | 1585 | 1437 | 1 | 32.9 | 7.8 | 22.2 | 9.7 | 16.6 | 10.1 | 18.5 | 11.7 |
| Hs\|NM_033360.2\|1586 | 1586 | 1438 | 1 | 52.5 | 2.5 | 36.2 | 6.1 | 23.8 | 7.2 | 26.0 | 3.6 |
| Hs\|NM_033360.2\|1597 | 1597 | h1499 | 1 | 38.2 | N/A | 36.1 | N/A | 29.3 | 7.6 | 31.1 | 3.9 |
| Hs\|NM_033360.2\|1606 | 1606 | h1508 | 1 | 45.4 | 5.0 | 28.5 | 4.2 | 110.9 | 2.9 | 119.3 | 2.0 |
| Hs\|NM_033360.2\|1630 | 1630 | 1471 | 1 | 23.2 | 8.0 | 16.5 | 8.1 | 26.8 | 7.3 | 34.7 | 4.8 |
| Hs\|NM_033360.2\|1631 | 1631 | 1472 | 1 | 35.4 | 5.2 | 23.6 | 5.7 | 37.1 | 4.6 | 44.0 | 4.2 |
| Hs\|NM_033360.2\|1632 | 1632 | 1473 | 1 | 26.9 | 2.3 | 20.0 | 1.6 | 29.8 | 4.3 | 32.8 | 1.8 |
| Hs\|NM_033360.2\|1633 | 1633 | 1474 | 1 | 25.4 | 5.8 | 24.4 | 13.4 | 31.6 | 3.4 | 138.9 | 7.6 |
| Hs\|NM_033360.2\|1634 | 1634 | 1475 | 1 | 27.8 | 3.5 | 20.3 | 3.6 | 28.5 | 5.9 | 31.6 | 5.3 |
| Hs\|NM_033360.2\|1635 | 1635 | 1476 | 1 | 29.8 | 0.4 | 23.2 | 3.4 | 37.4 | 4.9 | 38.7 | 4.7 |
| Hs\|NM_033360.2\|1636 | 1636 | 1477 | 1 | 51.0 | 22.3 | 38.9 | 11.1 | 63.5 | 11.6 | 65.0 | 6.7 |
| Hs\|NM_033360.2\|1637 | 1637 | 1478 | 1 | 31.5 | 7.4 | 14.0 | 11.9 | 28.2 | 6.0 | 37.3 | 6.0 |
| Hs\|NM_033360.2\|1638 | 1638 | 1479 | 1 | 31.1 | 1.4 | 27.4 | 2.5 | 44.1 | 8.9 | 51.8 | 3.0 |
| Hs\|NM_033360.2\|1639 | 1639 | 1480 | 1 | 47.7 | 4.9 | 26.0 | 7.7 | 57.0 | 3.2 | 60.9 | 2.6 |
| Hs\|NM_033360.2\|1640 | 1640 | 1481 | 1 | 35.1 | 3.7 | 17.7 | 4.2 | 62.1 | 2.6 | 59.9 | 3.7 |
| Hs\|NM_033360.2\|1736 | 1736 | h1638 | 1 | 30.9 | 3.9 | 20.2 | 7.0 | 133.0 | 2.5 | 110.1 | 1.7 |
| Hs\|NM_033360.2\|1741 | 1741 | h1643 | 1 | 25.2 | 9.1 | 12.4 | 7.0 | 126.6 | 0.8 | 111.7 | 4.0 |
| Hs\|NM_033360.2\|1742 | 1742 | h1644 | 1 | 18.5 | 4.4 | 11.5 | 6.7 | 130.1 | 4.7 | 106.9 | 4.9 |
| Hs\|NM_033360.2\|1753 | 1753 | h1655 | 1 | 33.4 | 15.2 | 29.9 | 5.2 | 130.3 | 3.4 | 105.4 | 2.0 |
| Hs\|NM_033360.2\|1754 | 1754 | h1656 | 1 | 31.3 | 5.8 | 14.6 | 16.3 | 93.9 | 4.7 | 100.7 | 4.6 |
| Hs\|NM_033360.2\|1769 | 1769 | h1671 | 1 | 25.7 | 4.9 | 18.4 | 11.5 | 107.6 | 4.2 | 129.9 | 14.3 |
| Hs\|NM_033360.2\|1771 | 1771 | h1673 | 1 | 31.4 | 3.1 | 13.9 | 9.0 | 106.8 | 12.2 | 100.8 | 8.5 |
| Hs\|NM_033360.2\|1772 | 1772 | h1674 | 1 | 24.5 | 3.5 | 13.2 | 5.0 | 111.3 | 1.0 | 95.3 | 2.4 |
| Hs\|NM_033360.2\|1783 | 1783 | h1685 | 1 | 31.3 | 2.2 | 27.9 | 11.1 | 126.6 | 4.0 | 109.3 | 5.4 |
| Hs\|NM_033360.2\|1784 | 1784 | h1686 | 1 | 33.6 | 16.9 | 22.0 | 20.9 | 121.4 | 15.0 | 98.0 | 15.2 |
| Hs\|NM_033360.2\|1785 | 1785 | h1687 | 1 | 28.2 | 4.9 | 19.9 | 5.0 | 124.1 | 2.2 | 105.5 | 5.3 |
| Hs\|NM_033360.2\|1799 | 1799 | h1701 | 1 | 23.0 | 6.1 | 15.1 | 8.4 | 128.6 | 1.8 | 106.8 | 2.8 |
| Hs\|NM_033360.2\|2100 | 2100 | h2002 | 1 | 49.7 | 19.4 | 34.1 | 12.1 | 106.3 | 5.6 | 111.4 | 2.7 |
| Hs\|NM_033360.2\|2134 | 2134 | h2036 | 1 | 51.2 | N/A | 35.0 | N/A | 130.2 | 3.6 | 119.6 | 4.9 |
| Hs\|NM_033360.2\|2216 | 2216 | h2118 | 1 | 28.4 | 4.6 | 13.2 | 6.6 | 113.2 | 2.8 | 114.0 | 2.6 |
| Hs\|NM_033360.2\|2217 | 2217 | h2119 | 1 | 23.6 | 6.9 | 11.2 | 12.2 | 127.0 | 1.7 | 111.9 | 1.8 |
| Hs\|NM_033360.2\|2218 | 2218 | h2120 | 1 | 30.7 | 13.0 | 16.3 | 11.9 | 119.3 | 2.4 | 106.3 | 7.2 |
| Hs\|NM_033360.2\|2229 | 2229 | h2131 | 1 | 34.4 | 6.7 | 16.0 | 6.5 | 118.3 | 3.9 | 110.1 | 8.9 |
| Hs\|NM_033360.2\|2247 | 2247 | h2149 | 1 | 31.2 | 6.8 | 18.1 | 10.6 | 129.1 | 6.1 | 117.7 | 6.2 |
| Hs\|NM_033360.2\|2326 | 2326 | h2228 | 1 | 85.1 | 24.0 | 118.0 | 25.0 | 170.9 | 9.9 | 151.3 | 16.5 |
| Hs\|NM_033360.2\|2327 | 2327 | h2229 | 1 | 105.3 | 4.8 | 76.9 | 2.9 | 106.7 | 1.1 | 108.6 | 6.0 |
| Hs\|NM_033360.2\|2547 | 2547 | 2285 | 1 | 68.5 | 3.8 | 41.4 | 1.8 | 98.3 | 6.3 | 102.5 | 2.4 |
| Hs\|NM_033360.2\|2548 | 2548 | 2286 | 1 | 50.0 | 6.7 | 30.2 | 12.6 | 85.8 | 3.2 | 80.3 | 3.1 |
| Hs\|NM_033360.2\|3741 | 3741 | h3643 | 1 | 51.3 | 21.2 | 51.4 | 10.6 | 110.0 | 2.5 | 97.0 | 2.8 |
| Hs\|NM_033360.2\|3746 | 3746 | h3648 | 1 | 49.6 | 10.5 | 41.6 | 11.3 | 129.2 | 8.7 | 116.8 | 9.0 |
| Hs\|NM_033360.2\|3747 | 3747 | h3649 | 1 | 42.3 | 3.9 | 39.2 | 3.2 | 115.5 | 1.5 | 105.8 | 1.7 |
| Hs\|NM_033360.2\|3783 | 3783 | h3685 | 1 | 36.2 | 4.3 | 31.1 | 4.7 | 119.2 | 2.3 | 108.7 | 1.3 |
| Hs\|NM_033360.2\|3784 | 3784 | h3686 | 1 | 78.0 | 20.4 | 42.2 | 11.3 | 141.2 | 6.9 | 125.0 | 1.4 |
| Hs\|NM_033360.2\|3810 | 3810 | h3712 | 1 | 56.0 | 18.6 | 39.7 | 19.3 | 91.2 | 1.6 | 102.4 | 2.5 |
| Hs\|NM_033360.2\|4396 | 4396 | 3584 | 1 | 58.6 | 2.6 | 48.2 | 2.0 | 88.8 | 3.1 | 94.0 | 2.2 |
| Hs\|NM_033360.2\|4447 | 4447 | 3633 | 1 | 65.1 | 3.6 | 49.0 | 1.9 | 78.4 | 9.3 | 76.4 | 9.6 |
| Hs\|NM_033360.2\|4448 | 4448 | 3634 | 1 | 41.7 | 3.1 | 31.5 | 8.6 | 98.3 | 4.5 | 86.0 | 4.2 |
| Hs\|NM_033360.2\|4449 | 4449 | 3635 | 1 | 57.3 | 11.0 | 54.8 | 10.9 | 108.2 | 7.1 | 92.5 | 5.0 |
| Hs\|NM_033360.2\|4450 | 4450 | 3636 | 1 | 55.8 | 7.5 | 54.7 | 6.3 | 87.6 | 7.5 | 75.0 | 9.4 |
| Hs\|NM_033360.2\|4451 | 4451 | 3637 | 1 | 76.7 | 3.5 | 74.5 | 3.8 | 106.1 | 1.1 | 88.3 | 2.3 |
| Hs\|NM_033360.2\|4452 | 4452 | 3638 | 1 | 56.1 | 2.1 | 50.0 | 4.1 | 109.4 | 4.5 | 94.8 | 5.9 |
| Hs\|NM_033360.2\|4748 | 4748 | 3940 | 1 | 54.7 | 13.7 | 41.7 | 10.8 | 89.1 | 0.9 | 97.6 | 1.0 |
| Hs\|NM_033360.2\|4749 | 4749 | 3941 | 1 | 52.3 | 13.5 | 41.0 | 9.5 | 109.1 | 5.4 | 109.6 | 4.0 |
| Hs\|NM_033360.2\|4878 | 4878 | 4082 | 1 | 63.9 | 4.5 | 63.1 | 5.1 | 116.7 | 7.2 | 104.9 | 7.1 |
| Hs\|NM_033360.2\|4879 | 4879 | 4083 | 1 | 43.5 | 4.1 | 41.3 | 2.3 | 117.8 | 4.3 | 102.2 | 4.2 |
| Hs\|NM_033360.2\|4880 | 4880 | 4084 | 1 | 64.1 | 10.5 | 75.7 | 12.4 | 119.1 | 3.4 | 100.4 | 5.1 |
| Hs\|NM_033360.2\|5073 | 5073 | 4259 | 1 | 36.8 | 4.0 | 36.1 | 7.2 | 116.2 | 2.9 | 106.8 | 5.9 |
| Hs\|NM_033360.2\|5074 | 5074 | 4260 | 1 | 45.0 | 3.6 | 58.5 | 3.0 | 148.1 | 7.0 | 129.1 | 6.9 |
| Hs\|NM_033360.2\|5075 | 5075 | 4261 | 1 | 48.5 | 2.6 | 53.1 | 6.6 | | | | |
| Hs\|NM_033360.2\|5076 | 5076 | 4262 | 1 | 38.4 | 9.2 | 29.4 | 10.6 | 83.3 | N/A | 90.7 | N/A |
| Hs\|NM_033360.2\|5077 | 5077 | 4263 | 1 | 32.9 | 6.0 | 29.1 | 4.0 | 91.5 | 4.8 | 91.2 | 3.5 |
| Hs\|NM_033360.2\|5078 | 5078 | 4264 | 1 | 29.7 | 7.8 | 28.6 | 6.7 | 99.1 | 2.6 | 95.2 | 1.1 |
| Hs\|NM_033360.2\|5128 | 5128 | 4314 | 1 | 56.7 | 4.6 | 62.4 | 5.3 | 108.3 | 3.9 | 91.6 | 4.6 |
| Hs\|NM_033360.2\|5129 | 5129 | 4315 | 1 | 54.7 | 5.3 | 61.6 | 6.4 | 110.3 | 9.6 | 91.4 | 9.8 |
| Hs\|NM_033360.2\|5138 | 5138 | 4324 | 1 | 38.2 | 6.5 | 42.1 | 5.6 | 102.6 | 6.7 | 96.3 | 7.8 |
| Hs\|NM_033360.2\|5139 | 5139 | 4325 | 1 | 31.5 | 7.1 | 35.6 | 9.6 | 101.4 | 0.9 | 89.0 | 2.7 |
| Hs\|NM_033360.2\|5140 | 5140 | 4326 | 1 | 47.1 | 21.2 | 40.8 | 15.3 | 114.9 | 2.9 | 96.7 | 5.7 |
| Hs\|NM_033360.2\|5141 | 5141 | 4327 | 1 | 48.6 | 4.8 | 41.9 | 5.7 | 76.3 | 2.9 | 82.6 | 3.1 |
| Hs\|NM_033360.2\|5142 | 5142 | 4328 | 1 | 60.3 | 16.7 | 54.1 | 17.5 | 95.4 | 1.1 | 90.9 | 1.4 |
| Hs\|NM_033360.2\|5143 | 5143 | 4329 | 1 | 42.2 | 7.7 | 42.5 | 10.0 | 89.2 | 7.9 | 84.5 | 4.0 |
| Hs\|NM_033360.2\|5163 | 5163 | 4349 | 1 | | | | | 109.7 | 2.4 | 94.3 | 2.1 |
| Hs\|NM_033360.2\|5164 | 5164 | 4350 | 1 | 34.5 | 6.4 | 37.5 | 6.1 | 94.7 | 3.6 | 79.5 | 5.3 |
| Hs\|NM_033360.2\|5167 | 5167 | 4353 | 1 | 49.4 | 9.8 | 54.7 | 11.0 | 89.9 | 12.2 | 76.5 | 14.1 |
| Hs\|NM_033360.2\|5168 | 5168 | 4354 | 1 | 46.9 | 2.4 | 54.3 | 5.4 | 111.9 | 3.8 | 95.9 | 1.5 |
| Hs\|NM_033360.2\|5169 | 5169 | 4355 | 1 | 52.8 | 3.3 | 52.1 | 4.9 | 113.7 | 3.1 | 99.7 | 2.8 |
| Hs\|NM_033360.2\|5170 | 5170 | 4356 | 1 | 42.2 | 3.2 | 38.2 | 1.6 | 82.6 | 5.5 | 84.1 | 3.1 |
| Hs\|NM_033360.2\|5171 | 5171 | 4357 | 1 | 51.6 | 5.7 | 49.4 | 4.5 | 86.4 | 0.6 | 92.6 | 1.4 |
| Hs\|NM_033360.2\|5172 | 5172 | 4358 | 1 | 56.4 | 6.2 | 58.8 | 4.5 | 81.0 | 4.0 | 79.6 | 3.7 |
| Hs\|NM_033360.2\|5173 | 5173 | 4359 | 1 | 44.8 | 8.5 | 51.5 | 8.1 | 89.8 | 4.2 | 87.9 | 5.7 |
| Hs\|NM_033360.2\|5197 | 5197 | 4435 | 1 | 63.9 | 19.5 | 64.1 | 10.2 | 90.5 | 3.8 | 94.4 | 5.1 |
| Hs\|NM_033360.2\|5198 | 5198 | 4436 | 1 | 47.3 | 5.7 | 58.2 | 6.4 | 91.9 | 3.3 | 92.9 | 6.0 |
| Hs\|NM_033360.2\|5199 | 5199 | 4437 | 1 | 50.0 | 4.8 | 52.7 | 4.8 | 114.0 | 4.9 | 95.5 | 3.9 |
| Hs\|NM_033360.2\|5200 | 5200 | 4438 | 1 | 65.4 | N/A | 69.3 | N/A | 98.1 | 4.0 | 88.1 | 1.8 |
| Hs\|NM_033360.2\|5201 | 5201 | 4439 | 1 | 54.0 | 4.4 | 42.2 | 5.7 | 89.1 | 10.4 | 79.4 | 6.4 |
| Hs\|NM_033360.2\|5202 | 5202 | 4440 | 1 | 45.3 | 4.6 | 41.8 | 5.9 | 109.5 | 1.8 | 92.8 | 3.7 |
| Hs\|NM_033360.2\|5203 | 5203 | 4441 | 1 | 35.7 | 5.7 | 34.5 | 3.1 | 102.3 | 2.7 | 87.3 | 2.3 |
| Hs\|NM_033360.2\|5204 | 5204 | 4442 | 1 | 51.9 | 5.3 | 55.8 | 3.3 | 107.5 | 8.5 | 90.1 | 8.9 |
| Hs\|NM_033360.2\|5205 | 5205 | 4443 | 1 | 57.7 | 24.4 | 67.9 | 34.1 | 105.0 | 6.0 | 90.4 | 4.0 |
| Hs\|NM_033360.2\|5209 | 5209 | 4447 | 1 | 55.1 | 7.8 | 58.9 | 7.2 | 121.2 | 7.6 | 102.1 | 6.1 |
| Hs\|NM_033360.2\|5210 | 5210 | 4448 | 1 | 46.9 | 8.9 | 45.0 | 9.1 | 106.8 | 5.0 | 94.1 | 3.1 |
| Hs\|NM_033360.2\|5211 | 5211 | 4449 | 1 | 54.4 | 11.7 | 54.8 | 11.5 | 107.4 | 4.8 | 94.8 | 6.4 |
| Hs\|NM_033360.2\|5212 | 5212 | 4450 | 1 | 41.3 | 7.5 | 33.3 | 6.6 | 101.2 | 6.8 | 83.0 | 8.4 |
| Hs\|NM_033360.2\|5213 | 5213 | 4451 | 1 | 47.6 | 3.6 | 42.6 | 5.1 | 84.6 | 6.4 | 66.6 | 8.0 |
| Hs\|NM_033360.2\|5214 | 5214 | 4452 | 1 | 43.5 | 5.2 | 42.7 | 9.1 | 106.3 | 1.7 | 82.9 | 2.2 |
| Hs\|NM_033360.2\|5234 | 5234 | 4472 | 1 | 45.0 | 3.8 | 47.3 | 5.0 | 103.1 | 4.9 | 83.9 | 4.0 |
| Hs\|NM_033360.2\|5235 | 5235 | 4473 | 1 | 39.8 | 9.1 | 41.1 | 7.7 | 86.6 | 13.1 | 71.4 | 10.3 |
| Hs\|NM_033360.2\|5252 | 5252 | 4491 | 1 | 34.4 | 17.6 | 39.8 | 17.3 | 139.6 | 6.9 | 127.6 | 9.9 |
| Hs\|NM_033360.2\|5253 | 5253 | 4492 | 1 | 24.2 | 12.4 | 23.9 | 11.2 | | | | |
| Hs\|NM_033360.2\|5254 | 5254 | 4493 | 1 | 35.3 | 7.6 | 36.8 | 7.9 | 102.0 | 1.2 | 84.1 | 1.6 |
| Hs\|NM_033360.2\|5255 | 5255 | 4494 | 1 | 38.1 | 7.3 | 32.2 | 4.5 | 71.0 | 3.3 | 86.8 | 1.7 |
| Hs\|NM_033360.2\|5256 | 5256 | 4497 | 1 | 52.5 | 5.8 | 48.3 | 7.2 | 89.4 | 2.2 | 93.8 | 4.1 |
| Hs\|NM_033360.2\|5257 | 5257 | 4542 | 1 | 40.0 | 7.6 | 36.6 | 8.8 | 90.3 | 5.7 | 79.7 | 4.6 |
| Hs\|NM_033360.2\|5258 | 5258 | 4548 | 1 | 27.1 | 8.7 | 21.1 | 6.4 | 90.8 | 3.0 | 86.0 | 4.0 |
| Hs\|NM_033360.2\|5295 | 5259 | 4551 | 1 | 44.7 | 20.6 | 50.5 | 24.9 | 124.7 | 4.2 | 102.6 | 3.0 |
| Hs\|NM_033360.2\|5260 | 5260 | 4591 | 1 | 48.0 | 2.0 | 50.1 | 2.8 | 110.2 | 3.6 | 108.4 | 3.3 |
| Hs\|NM_033360.2\|5299 | 5299 | 4594 | 1 | 58.7 | 3.4 | 64.4 | 3.3 | 148.0 | 7.0 | 131.7 | 9.8 |
| Hs\|NM_033360.2\|5300 | 5300 | 4597 | 1 | 87.6 | 9.8 | 93.5 | 6.4 | 127.6 | 11.6 | 136.8 | 10.6 |
| Hs\|NM_033360.2\|5304 | 5304 | 4495 | 1 | 116.3 | 7.7 | 91.4 | 8.9 | 91.2 | 2.0 | 107.3 | 2.7 |
| Hs\|NM_033360.2\|5305 | 5305 | 4498 | 1 | 107.0 | 6.1 | 109.6 | 6.2 | 117.0 | 5.4 | 126.7 | 4.5 |
| Hs\|NM_033360.2\|5306 | 5306 | 4543 | 1 | 97.6 | 1.4 | 110.9 | 1.7 | 99.0 | 8.4 | 95.3 | 7.2 |
| Hs\|NM_033360.2\|5307 | 5307 | 4549 | 1 | 98.3 | 5.2 | 113.5 | 1.6 | 116.9 | 2.1 | 112.7 | 1.8 |
| Hs\|NM_033360.2\|5308 | 5308 | 4552 | 1 | 147.8 | 11.0 | 180.2 | 11.4 | 143.6 | 10.3 | 124.2 | 7.3 |
| Hs\|NM_033360.2\|5309 | 5309 | 4592 | 1 | 129.4 | 8.9 | 152.9 | 11.7 | 118.2 | 5.2 | 115.1 | 6.7 |
| Hs\|NM_033360.2\|5347 | 5347 | 4595 | 1 | 41.5 | 2.4 | 45.4 | 3.9 | 105.0 | 9.6 | 90.0 | 7.1 |
| Hs\|NM_033360.2\|5348 | 5348 | 4632 | 1 | 75.8 | 8.9 | 88.4 | 6.6 | 119.6 | 8.6 | 105.3 | 12.9 |
| Hs\|NM_033360.2\|5349 | 5349 | 4496 | 1 | 78.2 | 2.7 | 65.1 | 3.0 | 95.2 | 3.2 | 111.7 | 1.9 |
| Hs\|NM_033360.2\|5350 | 5350 | 4499 | 1 | 92.3 | 2.7 | 94.9 | 2.5 | 114.7 | 3.0 | 125.1 | 2.7 |
| Hs\|NM_033360.2\|5351 | 5351 | 4547 | 1 | 61.8 | 13.7 | 67.0 | 16.6 | 96.1 | 5.2 | 81.8 | 9.0 |
| Hs\|NM_033360.2\|5352 | 5352 | 4550 | 1 | 54.8 | 11.2 | 58.5 | 6.0 | 97.8 | 6.1 | 93.4 | 6.1 |
| Hs\|NM_033360.2\|5353 | 5353 | 4590 | 1 | 75.5 | 8.8 | 89.7 | 9.5 | 124.3 | 9.8 | 108.1 | 8.3 |
| Hs\|NM_033360.2\|5354 | 5354 | 4593 | 1 | 52.7 | 16.3 | 63.2 | 16.3 | 90.4 | 4.4 | 85.8 | 6.9 |
| Hs\|NM_033360.2\|5389 | 5389 | 4596 | 1 | 44.4 | 3.1 | 52.5 | 4.7 | 110.6 | 5.2 | 98.3 | 2.7 |
| Hs\|NM_033360.2\|5390 | 5390 | 4633 | 1 | 36.7 | 5.0 | 36.1 | 6.3 | 97.8 | 2.4 | 90.8 | 2.8 |
| Hs\|NM_033360.2\|5391 | 5391 | 4634 | 1 | 29.0 | 5.7 | 26.4 | 5.9 | 62.7 | 3.5 | 67.1 | 5.6 |
| Hs\|NM_033360.2\|5392 | 5392 | 4635 | 1 | 45.8 | 5.2 | 44.9 | 4.5 | 98.7 | 6.7 | 95.3 | 8.4 |
| Hs\|NM_033360.2\|5393 | 5393 | 4636 | 1 | 51.3 | 3.6 | 52.7 | 4.1 | 110.4 | 2.3 | 101.9 | 1.9 |

As shown in Table 9, 103 of 243 asymmetric DsiRNAs examined showed greater than 70% reduction of human KRAS levels in HeLa cells at 1 nM, in both qPCR assays used to determine human KRAS levels. Of these 103 DsiRNAs, 37 exhibited greater than 80% reduction of human KRAS levels in HeLa cells at 1 nM in both qPCR assays used to determine human KRAS levels. A number of asymmetric DsiRNAs also capable of inhibiting mouse KRAS levels in mouse Hepa 1-6 cells at 1 nM in the environment of a cell were also identified in such assays.

[0337] 120 asymmetric DsiRNAs of the above experiment were then examined in a secondary assay (“Phase 2”), with results of such assays presented in histogram form in FIGS. 12-31. Specifically, the 120 asymmetric DsiRNAs selected from the 243 tested above were assessed for inhibition of human KRAS at 1 nM, 0.1 nM and 0.1 nM (0.1 nM was performed in duplicate, independent assays for each KRAS-targeting asymmetric DsiRNA) in the environment of human HeLa cells (FIGS. 12-21). These 120 asymmetric DsiRNAs were also assessed for inhibition of mouse KRAS at 1 nM, 0.1 nM and 0.1 nM (again, 0.1 nM was performed in duplicate, independent assays for each KRAS-targeting asymmetric DsiRNA) in the environment of mouse Hepa 1-6 cells (FIGS. 22-31). As shown in FIGS. 12-21, a remarkable number of asymmetric DsiRNAs reproducibly exhibited robust human KRAS inhibitory efficacies at 100 pM when assayed in the environment of HeLa cells. In addition, as shown in FIGS. 22-31, a number of these asymmetric DsiRNAs also showed robust mouse KRAS inhibitory efficacies at 1 nM and 100 pM when assayed in the environment of mouse Hepa 1-6 cells. (Meanwhile, human KRAS-specific inhibitory asymmetric DsiRNAs were also identified.)

### Example 7: Inhibition of KRAS by Additional Preferred DsiRNAs

[0338] The remaining DsiRNA molecules shown in Tables 4-5 possessing sense and antisense strand sequences as shown and targeting KRAS wild-type sequences (and variant sequences where applicable) are designed and synthesized as described above and tested in HeLa cells (and, optionally, in mouse Hepa 1-6 cells) for inhibitory efficacy as described in Examples 3 and 6 above. The ability of these DsiRNA agents to inhibit KRAS expression is optionally assessed in comparison to corresponding KRAS target sequence-directed 21mer siRNAs (21mer siRNA identification methods identical to those used to populate the siRNA sequences of Table 2 can be applied to the DsiRNAs of Tables 4-6). The remaining selected DsiRNA agents of Tables 4-6 are expected to show efficacy as KRAS inhibitors, with a significant number of tested DsiRNA agents anticipated to exhibit greater than 50% reduction of the KRAS target at 1 nM and at 100 pM. As seen for the DsiRNA agents of Tables 2-3, a significant majority of DsiRNAs are anticipated to outperform cognate siRNA pairs, as determined via measurement of efficacy in decreasing levels of KRAS target relative to the cognate siRNA agent. The duration of such inhibitory effects is also examined at both 24 hours and 48 hours post-administration, with concentrations of 0.1 nM, 1 nM and 5 nM tested. As above, a significant majority of DsiRNAs is anticipated to outperform its cognate siRNA pair, as determined via measurement of potency and duration of effect.

### Example 8: Indications

[0339] The present body of knowledge in KRAS research indicates the need for methods to assay KRAS activity and for compounds that can regulate KRAS expression for research, diagnostic, and therapeutic use. As described herein, the nucleic acid molecules of the present invention can be used in assays to diagnose disease state related to KRAS levels. In addition, the nucleic acid molecules can be used to treat disease state related to KRAS misregulation, levels, etc.

[0340] Particular disorders and disease states that can be associated with KRAS expression modulation include, but are not limited to cancer and/or proliferative diseases, conditions, or disorders and other diseases, conditions or disorders that are related to or will respond to the levels of KRAS in a cell or tissue, alone or in combination with other therapies. Particular degenerative and disease states that are associated with KRAS expression modulation include but are not limited to, for example lung cancer, colorectal cancer, bladder cancer, pancreatic cancer, breast cancer, and prostate cancer.

[0341] Gemcytabine and cyclophosphamide are non-limiting examples of chemotherapeutic agents that can be combined with or used in conjunction with the nucleic acid molecules (e.g. DsiRNA molecules) of the instant invention. Those skilled in the art will recognize that other drugs such as anti-cancer compounds and therapies can be similarly be readily combined with the nucleic acid molecules of the instant invention (e.g. DsiRNA molecules) and are hence within the scope of the instant invention. Such compounds and therapies are well known in the art (see for example Cancer: Principles and Practice of Oncology, Volumes 1 and 2, eds Devita, V. T., Hellman, S., and Rosenberg, S. A., J.B. Lippincott Company, Philadelphia, USA) and include, without limitations, antifolates; fluoropyrimidines; cytarabine; purine analogs; adenosine analogs; amsacrine; topoisomerase I inhibitors; anthrapyrazoles; retinoids; antibiotics such as bleomycin, anthacyclins, mitomycin C, dactinomycin, and mithramycin; hexamethylmelamine; dacarbazine; 1-asparaginase; platinum analogs; alkylating agents such as nitrogen mustard, melphalan, chlorambucil, busulfan, ifosfamide, 4-hydroperoxycyclophosphamide, nitrosoureas, thiotepa; plant derived compounds such as vinca alkaloids, epipodophyllotoxins, taxol; Tamoxifen; radiation therapy; surgery; nutritional supplements; gene therapy; radiotherapy such as 3D-CRT; immunotoxin therapy such as ricin, monoclonal antibodies Herceptin; and the like. For combination therapy, the nucleic acids of the invention are prepared in one of two ways. First, the agents are physically combined in a preparation of nucleic acid and chemotherapeutic agent, such as a mixture of a nucleic acid of the invention encapsulated in liposomes and ifosfamide in a solution for intravenous administration, wherein both agents are present in a therapeutically effective concentration (e.g., ifosfamide in solution to deliver 1000-1250 mg/m2/day and liposome-associated nucleic acid of the invention in the same solution to deliver 0.1-100 mg/kg/day). Alternatively, the agents are administered separately but simultaneously in their respective effective doses (e.g., 1000-1250 mg/m2/d ifosfamide and 0.1 to 100 mg/kg/day nucleic acid of the invention).

[0342] Those skilled in the art will recognize that other compounds and therapies used to treat the diseases and conditions described herein can similarly be combined with the nucleic acid molecules of the instant invention (e.g. siNA molecules) and are hence within the scope of the instant invention.

### Example 9: Serum Stability for DsiRNAs

[0343] Serum stability of DsiRNA agents is assessed via incubation of DsiRNA agents in 50% fetal bovine serum for various periods of time (up to 24 h) at 37° C. Serum is extracted and the nucleic acids are separated on a 20% non-denaturing PAGE and visualized with Gelstar stain. Relative levels of protection from nuclease degradation are assessed for DsiRNAs (optionally with and without modifications).

### Example 10: Use of Additional Cell Culture Models to Evaluate the Down-Regulation of KRAS Gene Expression

[0344] A variety of endpoints have been used in cell culture models to look at Ras-mediated effects after treatment with anti-Ras agents. Phenotypic endpoints include inhibition of cell proliferation, RNA expression, and reduction of Ras protein expression. Because KRAS oncogene mutations are directly associated with increased proliferation of certain tumor cells, a proliferation endpoint for cell culture assays is preferably used as the primary screen. There are several methods by which this endpoint can be measured. Following treatment of cells with DsiRNA, cells are allowed to grow (typically 5 days), after which the cell viability, the incorporation of [³H] thymidine into cellular DNA and/or the cell density are measured. The assay of cell density can be done in a 96-well format using commercially available fluorescent nucleic acid stains (such as Syto® 13 or CyQuant®). As a secondary, confirmatory endpoint, a DsiRNA-mediated decrease in the level of KRas protein expression can be evaluated using a KRas-specific ELISA.

### Example 11: Evaluation of Anti-KRAS DsiRNA Efficacy in a Mouse Model of KRAS Misregulation

[0345] Anti-KRAS DsiRNA chosen from in vitro assays can be further tested in mouse models, including, e.g., xenograft and other animal models as recited above. In one example, mice possessing misregulated (e.g., elevated) KRAS levels are administered a DsiRNA agent of the present invention via hydrodynamic tail vein injection. 3-4 mice per group (divided based upon specific DsiRNA agent tested) are injected with 50 μg or 200 μg of DsiRNA. Levels of KRAS RNA are evaluated using RT-qPCR. Additionally or alternatively, levels of KRas (e.g., KRas protein levels and/or cancer cell/tumor formation, growth or spread) can be evaluated using an art-recognized method, or phenotypes associated with misregulation of KRAS (e.g., tumor formation, growth, metastasis, etc.) are monitored (optionally as a proxy for measurement of KRAS transcript or KRas protein levels). Active DsiRNA in such animal models can also be subsequently tested in combination with standard chemotherapies.

### Example 12: Diagnostic Uses

[0346] The DsiRNA molecules of the invention can be used in a variety of diagnostic applications, such as in the identification of molecular targets (e.g., RNA) in a variety of applications, for example, in clinical, industrial, environmental, agricultural and/or research settings. Such diagnostic use of DsiRNA molecules involves utilizing reconstituted RNAi systems, for example, using cellular lysates or partially purified cellular lysates. DsiRNA molecules of this invention can be used as diagnostic tools to examine genetic drift and mutations within diseased cells. The close relationship between DsiRNA activity and the structure of the target KRAS RNA allows the detection of mutations in a region of the KRAS molecule, which alters the base-pairing and three-dimensional structure of the target KRAS RNA. By using multiple DsiRNA molecules described in this invention, one can map nucleotide changes, which are important to RNA structure and function in vitro, as well as in cells and tissues. Cleavage of target KRAS RNAs with DsiRNA molecules can be used to inhibit gene expression and define the role of specified gene products in the progression of a KRAS-associated disease or disorder. In this manner, other genetic targets can be defined as important mediators of the disease. These experiments will lead to better treatment of the disease progression by affording the possibility of combination therapies (e.g., multiple DsiRNA molecules targeted to different genes, DsiRNA molecules coupled with known small molecule inhibitors, or intermittent treatment with combinations of DsiRNA molecules and/or other chemical or biological molecules). Other in vitro uses of DsiRNA molecules of this invention are well known in the art, and include detection of the presence of RNAs associated with a disease or related condition. Such RNA is detected by determining the presence of a cleavage product after treatment with a DsiRNA using standard methodologies, for example, fluorescence resonance emission transfer (FRET).

[0347] In a specific example, DsiRNA molecules that cleave only wild-type or mutant or polymorphic forms of the target KRAS RNA are used for the assay. The first DsiRNA molecules (i.e., those that cleave only wild-type forms of target KRAS RNA) are used to identify wild-type KRAS RNA present in the sample and the second DsiRNA molecules (i.e., those that cleave only mutant or polymorphic forms of target RNA) are used to identify mutant or polymorphic KRAS RNA in the sample. As reaction controls, synthetic substrates of both wild-type and mutant or polymorphic KRAS RNA are cleaved by both DsiRNA molecules to demonstrate the relative DsiRNA efficiencies in the reactions and the absence of cleavage of the “non-targeted” KRAS RNA species. The cleavage products from the synthetic substrates also serve to generate size markers for the analysis of wild-type and mutant KRAS RNAs in the sample population. Thus, each analysis requires two DsiRNA molecules, two substrates and one unknown sample, which is combined into six reactions. The presence of cleavage products is determined using an RNase protection assay so that full-length and cleavage fragments of each KRAS RNA can be analyzed in one lane of a polyacrylamide gel. It is not absolutely required to quantify the results to gain insight into the expression of mutant or polymorphic KRAS RNAs and putative risk of KRAS-associated phenotypic changes in target cells. The expression of KRAS mRNA whose protein product is implicated in the development of the phenotype (i.e., disease related/associated) is adequate to establish risk. If probes of comparable specific activity are used for both transcripts, then a qualitative comparison of KRAS RNA levels is adequate and decreases the cost of the initial diagnosis. Higher mutant or polymorphic form to wild-type ratios are correlated with higher risk whether KRAS RNA levels are compared qualitatively or quantitatively.

[0348] All patents and publications mentioned in the specification are indicative of the levels of skill of those skilled in the art to which the invention pertains. All references cited in this disclosure are incorporated by reference to the same extent as if each reference had been incorporated by reference in its entirety individually.

[0349] One skilled in the art would readily appreciate that the present invention is well adapted to carry out the objects and obtain the ends and advantages mentioned, as well as those inherent therein. The methods and compositions described herein as presently representative of preferred embodiments are exemplary and are not intended as limitations on the scope of the invention. Changes therein and other uses will occur to those skilled in the art, which are encompassed within the spirit of the invention, are defined by the scope of the claims.

[0350] It will be readily apparent to one skilled in the art that varying substitutions and modifications can be made to the invention disclosed herein without departing from the scope and spirit of the invention. Thus, such additional embodiments are within the scope of the present invention and the following claims. The present invention teaches one skilled in the art to test various combinations and/or substitutions of chemical modifications described herein toward generating nucleic acid constructs with improved activity for mediating RNAi activity. Such improved activity can comprise improved stability, improved bioavailability, and/or improved activation of cellular responses mediating RNAi. Therefore, the specific embodiments described herein are not limiting and one skilled in the art can readily appreciate that specific combinations of the modifications described herein can be tested without undue experimentation toward identifying DsiRNA molecules with improved RNAi activity.

[0351] The invention illustratively described herein suitably can be practiced in the absence of any element or elements, limitation or limitations that are not specifically disclosed herein. Thus, for example, in each instance herein any of the terms “comprising”, “consisting essentially of”, and “consisting of” may be replaced with either of the other two terms. The terms and expressions which have been employed are used as terms of description and not of limitation, and there is no intention that in the use of such terms and expressions of excluding any equivalents of the features shown and described or portions thereof, but it is recognized that various modifications are possible within the scope of the invention claimed. Thus, it should be understood that although the present invention has been specifically disclosed by preferred embodiments, optional features, modification and variation of the concepts herein disclosed may be resorted to by those skilled in the art, and that such modifications and variations are considered to be within the scope of this invention as defined by the description and the appended claims.

[0352] In addition, where features or aspects of the invention are described in terms of Markush groups or other grouping of alternatives, those skilled in the art will recognize that the invention is also thereby described in terms of any individual member or subgroup of members of the Markush group or other group.

[0353] The use of the terms “a” and “an” and “the” and similar referents in the context of describing the invention (especially in the context of the following claims) are to be construed to cover both the singular and the plural, unless otherwise indicated herein or clearly contradicted by context. The terms “comprising,” “having,” “including,” and “containing” are to be construed as open-ended terms (i.e., meaning “including, but not limited to,”) unless otherwise noted. Recitation of ranges of values herein are merely intended to serve as a shorthand method of referring individually to each separate value falling within the range, unless otherwise indicated herein, and each separate value is incorporated into the specification as if it were individually recited herein. All methods described herein can be performed in any suitable order unless otherwise indicated herein or otherwise clearly contradicted by context. The use of any and all examples, or exemplary language (e.g., “such as”) provided herein, is intended merely to better illuminate the invention and does not pose a limitation on the scope of the invention unless

LENGTHY TABLES
The patent application contains a lengthy table section. A copy of the table is available in electronic form from the USPTO web site (https://seqdata.uspto.gov/?pageRequest=docDetail&DocID=US20230111150A1). An electronic copy of the table will also be available from the USPTO upon request and payment of the fee set forth in 37 CFR 1.19(b)(3).

1-53. (canceled)

54. An isolated double stranded nucleic acid (dsNA) comprising first and second nucleic acid strands and a duplex region of at least 25 base pairs, wherein each of said first and second nucleic acid strands has a length which is at least 25 and at most 35 nucleotides, wherein said second nucleic acid strand is sufficiently complementary to a target KRAS cDNA sequence selected from the group consisting of SEQ ID NOs: 141-186, 1595-4406, 4893-5135 and 6843-8537 along at least 21 nucleotides of said second nucleic acid strand length to reduce KRAS target gene expression when said dsNA is introduced into a mammalian cell.

55. The isolated dsNA of claim 54, wherein the 3′-end of the first nucleic acid strand and the 5′ end of the second nucleic acid strand are linked by a chemical linker, extended loop or tetraloop.

56. The isolated dsNA of claim 54, wherein said first nucleic acid strand is 25 nucleotides in length and said second nucleic acid strand is 27 nucleotides in length.

57. The isolated dsNA of claim 54, wherein said second nucleic acid strand comprises a sequence selected from the group consisting of SEQ ID NOs: 11-50, 189-891, 2298-3000 and 4407-4649 and/or wherein said first nucleic acid strand comprises a sequence selected from the group consisting of SEQ ID NOs: 91-128, 892-1594, 3001-3703 and 5144-6838.

58. The isolated dsNA of claim 54, wherein said second nucleic acid strand of said dsNA comprises 1-5 single-stranded nucleotides at its 3′-terminus.

59. The isolated dsNA of claim 54, wherein said dsNA comprises a modified nucleotide residue.

60. The isolated dsNA of claim 54, wherein the modified nucleotide residue is selected from the group consisting of a deoxyribonucleotide, a dideoxyribonucleotide, an acyclonucleotide, a 3′-deoxyadenosine (cordycepin), a 3′-azido-3′-deoxythymidine (AZT), a 2′,3′-dideoxyinosine (ddI), a 2′,3′-dideoxy-3′-thiacytidine (3TC), a 2′,3′-didehydro-2′,3′-dideoxythymidine (d4T), a monophosphate nucleotide of 3′-azido-3′-deoxythymidine (AZT), a 2′,3′-dideoxy-3′-thiacytidine (3TC) and a monophosphate nucleotide of 2′,3′-didehydro-2′,3′-dideoxythymidine (d4T), a 4-thiouracil, a 5-bromouracil, a 5-iodouracil, a 5-(3-aminoallyl)-uracil, a 2′-O-alkyl ribonucleotide, a 2′-O-methyl ribonucleotide, a 2′-amino ribonucleotide, a 2′-fluoro ribonucleotide, a locked nucleic acid, 2′-methoxyethoxy, 2′-allyl, 2′-O-[2-(methylamino)-2-oxoethyl], 4′-thio, 4′-CH2-O-2′-bridge, 4′-(CH2)₂—O-2′-bridge, and 2′-O—(N-methylcarbamate).

61. The isolated dsNA of claim 54, wherein said second nucleic acid strand is sufficiently complementary to a target KRAS cDNA sequence selected from the group consisting of SEQ ID NOs: 141-186, 1595-4406, 4893-5135 and 6843-8537 along at least 19 nucleotides of said second nucleic acid strand length to reduce KRAS target gene expression when said dsNA is introduced into a mammalian cell.

62. The isolated dsNA of claim 54, comprising a phosphate backbone modification selected from the group consisting of a phosphonate, a phosphorothioate and a phosphotriester.

63. A composition possessing KRAS inhibitory activity consisting essentially of an isolated double stranded nucleic acid (dsNA) comprising first and second nucleic acid strands and a duplex region of at least 25 base pairs, wherein each of said first and second nucleic acid strands comprises RNA, wherein said second nucleic acid strand of said dsNA comprises 1-5 single-stranded nucleotides at its 3′-terminus, wherein said second nucleic acid strand is complementary to a target KRAS cDNA sequence selected from the group consisting of SEQ ID NOs: 141-186, 1595-4406, 4893-5135 and 6843-8537 along at least 21 nucleotides of said second nucleic acid strand length and said dsNA reduces KRAS target gene expression when said dsNA is introduced into a mammalian cell.

64. The isolated dsNA of claim 63, wherein the 3′-end of the first nucleic acid strand and the 5′-end of the second nucleic acid strand are linked by a chemical linker, extended loop or tetraloop.

65. The isolated dsNA of claim 63, wherein said first nucleic acid strand is 25 nucleotides in length and said second nucleic acid strand is 27 nucleotides in length.

66. The isolated dsNA of claim 63, wherein said second nucleic acid strand comprises a sequence selected from the group consisting of SEQ ID NOs: 11-50, 189-891, 2298-3000 and 4407-4649 and/or wherein said first nucleic acid strand comprises a sequence selected from the group consisting of SEQ ID NOs: 91-128, 892-1594, 3001-3703 and 5144-6838.

67. The isolated dsNA of claim 63, wherein said dsNA comprises a modified nucleotide residue.

68. The isolated dsNA of claim 67, wherein the modified nucleotide residue is selected from the group consisting of a deoxyribonucleotide, a dideoxyribonucleotide, an acyclonucleotide, a 3′-deoxyadenosine (cordycepin), a 3′-azido-3′-deoxythymidine (AZT), a 2′,3′-dideoxyinosine (ddI), a 2′,3′-dideoxy-3′-thiacytidine (3TC), a 2′,3′-didehydro-2′,3′-dideoxythymidine (d4T), a monophosphate nucleotide of 3′-azido-3′-deoxythymidine (AZT), a 2′,3′-dideoxy-3′-thiacytidine (3TC) and a monophosphate nucleotide of 2′,3′-didehydro-2′,3′-dideoxythymidine (d4T), a 4-thiouracil, a 5-bromouracil, a 5-iodouracil, a 5-(3-aminoallyl)-uracil, a 2′-O-alkyl ribonucleotide, a 2′-O-methyl ribonucleotide, a 2′-amino ribonucleotide, a 2′-fluoro ribonucleotide, a locked nucleic acid, 2′-methoxyethoxy, 2′-allyl, 2′-O-[2-(methylamino)-2-oxoethyl], 4′-thio, 4′-CH2-O-2′-bridge, 4′-(CH2)₂—O-2′-bridge, and 2′-O—(N-methylcarbamate).

69. A method for reducing expression of a target KRAS gene in a mammalian cell comprising contacting a mammalian cell in vitro with an isolated dsNA of claim 54 in an amount sufficient to reduce expression of a target KRAS gene in said cell.

70. The method of claim 69, wherein KRAS mRNA levels are reduced by an amount (expressed by %) of at least 90% at least 8 days after said cell is contacted with said dsNA, or at least 70% at least 10 days after said cell is contacted with said dsNA.

71. A method for reducing expression of a target KRAS gene in a mammal comprising administering an isolated dsNA of claim 54 to a mammal in an amount sufficient to reduce expression of a target KRAS gene in the mammal.

72. The method of claim 71, wherein said administering step comprises a mode selected from the group consisting of intravenous injection, intramuscular injection, intraperitoneal injection, infusion, subcutaneous injection, transdermal, aerosol, rectal, vaginal, topical, oral and inhaled delivery.

73. A method for selectively inhibiting the growth of a cell comprising contacting a cell with an amount of an isolated dsNA of claim 54 sufficient to inhibit the growth of the cell, wherein said cell is a pancreatic carcinoma cell.

74. A pharmaceutical composition comprising the isolated dsNA of claim 54 and a pharmaceutically acceptable carrier.

The application's sequence listing, which the Patent Office published only in electronic form, follows.

SEQUENCE LISTING (8550 sequences)

SEQ ID NO: 1 - DNA, 5436 bp, Homo sapiens
  source 1..5436: mol_type = other DNA
ggccgcggcggcggaggcagcagcggcggcggcagtggcggcggcgaaggtggcggcggctcggccagtactcccggcccccgccatttcggactgggagcgagcgcggcgcaggcactgaaggcggcggcggggccagaggctcagcggctcccaggtgcgggagagaggcctgctgaaaatgactgaatataaacttgtggtagttggagctggtggcgtaggcaagagtgccttgacgatacagctaattcagaatcattttgtggacgaatatgatccaacaatagaggattcctacaggaagcaagtagtaattgatggagaaacctgtctcttggatattctcgacacagcaggtcaagaggagtacagtgcaatgagggaccagtacatgaggactggggagggctttctttgtgtatttgccataaataatactaaatcatttgaagatattcaccattatagagaacaaattaaaagagttaaggactctgaagatgtacctatggtcctagtaggaaataaatgtgatttgccttctagaacagtagacacaaaacaggctcaggacttagcaagaagttatggaattccttttattgaaacatcagcaaagacaagacagagagtggaggatgctttttatacattggtgagggagatccgacaatacagattgaaaaaaatcagcaaagaagaaaagactcctggctgtgtgaaaattaaaaaatgcattataatgtaatctgggtgttgatgatgccttctatacattagttcgagaaattcgaaaacataaagaaaagatgagcaaagatggtaaaaagaagaaaaagaagtcaaagacaaagtgtgtaattatgtaaatacaatttgtacttttttcttaaggcatactagtacaagtggtaatttttgtacattacactaaattattagcatttgttttagcattacctaatttttttcctgctccatgcagactgttagcttttaccttaaatgcttattttaaaatgacagtggaagtttttttttcctctaagtgccagtattcccagagttttggtttttgaactagcaatgcctgtgaaaaagaaactgaatacctaagatttctgtcttggggtttttggtgcatgcagttgattacttcttatttttcttaccaattgtgaatgttggtgtgaaacaaattaatgaagcttttgaatcatccctattctgtgttttatctagtcacataaatggattaattactaatttcagttgagaccttctaattggtttttactgaaacattgagggaacacaaatttatgggcttcctgatgatgattcttctaggcatcatgtcctatagtttgtcatccctgatgaatgtaaagttacactgttcacaaaggttttgtctcctttccactgctattagtcatggtcactctccccaaaatattatattttttctataaaaagaaaaaaatggaaaaaaattacaaggcaatggaaactattataaggccatttccttttcacattagataaattactataaagactcctaatagcttttcctgttaaggcagacccagtatgaaatggggattattatagcaaccattttggggctatatttacatgctactaaatttttataataattgaaaagattttaacaagtataaaaaattctcataggaattaaatgtagtctccctgtgtcagactgctctttcatagtataactttaaatcttttcttcaacttgagtctttgaagatagttttaattctgcttgtgacattaaaagattatttgggccagttatagcttattaggtgttgaagagaccaaggttgcaaggccaggccctgtgtgaacctttgagctttcatagagagtttcacagcatggactgtgtccccacggtcatccagtgttgtcatgcattggttagtcaaaatggggagggactagggcagtttggatagctcaacaagatacaatctcactctgtggtggtcctgctgacaaatcaagagcattgcttttgtttcttaagaaaacaaactcttttttaaaaattacttttaaatattaactcaaaagttgagattttggggtggtggtgtgccaagacattaattttttttttaaacaatgaagtgaaaaagttttacaatctctaggtttggctagttctcttaacactggttaaattaacattgcataaacacttttcaagtctgatccatatttaataatgctttaaaataaaaataaaaacaatccttttgataaatttaaaatgttacttattttaaaataaatgaagtgagatggcatggtgaggtgaaagtatcactggactaggaagaaggtgacttaggttctagataggtgtcttttaggactctgattttgaggacatcacttactatccatttcttcatgttaaaagaagtcatctcaaactcttagttttttttttttacaactatgtaatttatattccatttacataaggatacacttatttgtcaagctcagcacaatctgtaaatttttaacctatgttacaccatcttcagtgccagtcttgggcaaaattgtgcaagaggtgaagtttatatttgaatatccattctcgttttaggactcttcttccatattagtgtcatcttgcctccctaccttccacatgccccatgacttgatgcagttttaatacttgtaattcccctaaccataagatttactgctgctgtggatatctccatgaagttttcccactgagtcacatcagaaatgccctacatcttatttcctcagggctcaagagaatctgacagataccataaagggatttgacctaatcactaattttcaggtggtggctgatgctttgaacatctctttgctgcccaatccattagcgacagtaggatttttcaaacctggtatgaatagacagaaccctatccagtggaaggagaatttaataaagatagtgctgaaagaattccttaggtaatctataactaggactactcctggtaacagtaatacattccattgttttagtaaccagaaatcttcatgcaatgaaaaatactttaattcatgaagcttactttttttttttggtgtcagagtctcgctcttgtcacccaggctggaatgcagtggcgccatctcagctcactgcaacctccatctcccaggttcaagcgattctcgtgcctcggcctcctgagtagctgggattacaggcgtgtgccactacactcaactaatttttgtatttttaggagagacggggtttcaccctgttggccaggctggtctcgaactcctgacctcaagtgattcacccaccttggcctcataaacctgttttgcagaactcatttattcagcaaatatttattgagtgcctaccagatgccagtcaccgcacaaggcactgggtatatggtatccccaaacaagagacataatcccggtccttaggtagtgctagtgtggtctgtaatatcttactaaggcctttggtatacgacccagagataacacgatgcgtattttagttttgcaaagaaggggtttggtctctgtgccagctctataattgttttgctacgattccactgaaactcttcgatcaagctactttatgtaaatcacttcattgttttaaaggaataaacttgattatattgtttttttatttggcataactgtgattcttttaggacaattactgtacacattaaggtgtatgtcagatattcatattgacccaaatgtgtaatattccagttttctctgcataagtaattaaaatatacttaaaaattaatagttttatctgggtacaaataaacaggtgcctgaactagttcacagacaaggaaacttctatgtaaaaatcactatgatttctgaattgctatgtgaaactacagatctttggaacactgtttaggtagggtgttaagacttacacagtacctcgtttctacacagagaaagaaatggccatacttcaggaactgcagtgcttatgaggggatatttaggcctcttgaatttttgatgtagatgggcatttttttaaggtagtggttaattacctttatgtgaactttgaatggtttaacaaaagatttgtttttgtagagattttaaagggggagaattctagaaataaatgttacctaattattacagccttaaagacaaaaatccttgttgaagtttttttaaaaaaagctaaattacatagacttaggcattaacatgtttgtggaagaatatagcagacgtatattgtatcatttgagtgaatgttcccaagtaggcattctaggctctatttaactgagtcacactgcataggaatttagaacctaacttttataggttatcaaaactgttgtcaccattgcacaattttgtcctaatatatacatagaaactttgtggggcatgttaagttacagtttgcacaagttcatctcatttgtattccattgattttttttttcttctaaacattttttcttcaaacagtatataactttttttaggggatttttttttagacagcaaaaactatctgaagatttccatttgtcaaaaagtaatgatttcttgataattgtgtagtaatgttttttagaacccagcagttaccttaaagctgaatttatatttagtaacttctgtgttaatactggatagcatgaattctgcattgagaaactgaatagctgtcataaaatgaaactttctttctaaagaaagatactcacatgagttcttgaagaatagtcataactagattaagatctgtgttttagtttaatagtttgaagtgcctgtttgggataatgataggtaatttagatgaatttaggggaaaaaaaagttatctgcagatatgttgagggcccatctctccccccacacccccacagagctaactgggttacagtgttttatccgaaagtttccaattccactgtcttgtgttttcatgttgaaaatacttttgcatttttcctttgagtgccaatttcttactagtactatttcttaatgtaacatgtttacctggaatgtattttaactatttttgtatagtgtaaactgaaacatgcacattttgtacattgtgctttcttttgtgggacatatgcagtgtgatccagttgttttccatcatttggttgcgctgacctaggaatgttggtcatatcaaacattaaaaatgaccactcttttaattgaaattaacttttaaatgtttataggagtatgtgctgtgaagtgatctaaaatttgtaatatttttgtcatgaactgtactactcctaattattgtaatgtaataaaaatagttacagtgacaaaaaaaaaaaaaaa

SEQ ID NO: 2 - protein, 189 aa, Homo sapiens [sequence omitted]

SEQ ID NO: 3 - DNA, 5312 bp, Homo sapiens
  source 1..5312: mol_type = other DNA
ggccgcggcggcggaggcagcagcggcggcggcagtggcggcggcgaaggtggcggcggctcggccagtactcccggcccccgccatttcggactgggagcgagcgcggcgcaggcactgaaggcggcggcggggccagaggctcagcggctcccaggtgcgggagagaggcctgctgaaaatgactgaatataaacttgtggtagttggagctggtggcgtaggcaagagtgccttgacgatacagctaattcagaatcattttgtggacgaatatgatccaacaatagaggattcctacaggaagcaagtagtaattgatggagaaacctgtctcttggatattctcgacacagcaggtcaagaggagtacagtgcaatgagggaccagtacatgaggactggggagggctttctttgtgtatttgccataaataatactaaatcatttgaagatattcaccattatagagaacaaattaaaagagttaaggactctgaagatgtacctatggtcctagtaggaaataaatgtgatttgccttctagaacagtagacacaaaacaggctcaggacttagcaagaagttatggaattccttttattgaaacatcagcaaagacaagacagggtgttgatgatgccttctatacattagttcgagaaattcgaaaacataaagaaaagatgagcaaagatggtaaaaagaagaaaaagaagtcaaagacaaagtgtgtaattatgtaaatacaatttgtacttttttcttaaggcatactagtacaagtggtaatttttgtacattacactaaattattagcatttgttttagcattacctaatttttttcctgctccatgcagactgttagcttttaccttaaatgcttattttaaaatgacagtggaagtttttttttcctctaagtgccagtattcccagagttttggtttttgaactagcaatgcctgtgaaaaagaaactgaatacctaagatttctgtcttggggtttttggtgcatgcagttgattacttcttatttttcttaccaattgtgaatgttggtgtgaaacaaattaatgaagcttttgaatcatccctattctgtgttttatctagtcacataaatggattaattactaatttcagttgagaccttctaattggtttttactgaaacattgagggaacacaaatttatgggcttcctgatgatgattcttctaggcatcatgtcctatagtttgtcatccctgatgaatgtaaagttacactgttcacaaaggttttgtctcctttccactgctattagtcatggtcactctccccaaaatattatattttttctataaaaagaaaaaaatggaaaaaaattacaaggcaatggaaactattataaggccatttccttttcacattagataaattactataaagactcctaatagcttttcctgttaaggcagacccagtatgaaatggggattattatagcaaccattttggggctatatttacatgctactaaatttttataataattgaaaagattttaacaagtataaaaaattctcataggaattaaatgtagtctccctgtgtcagactgctctttcatagtataactttaaatcttttcttcaacttgagtctttgaagatagttttaattctgcttgtgacattaaaagattatttgggccagttatagcttattaggtgttgaagagaccaaggttgcaaggccaggccctgtgtgaacctttgagctttcatagagagtttcacagcatggactgtgtccccacggtcatccagtgttgtcatgcattggttagtcaaaatggggagggactagggcagtttggatagctcaacaagatacaatctcactctgtggtggtcctgctgacaaatcaagagcattgcttttgtttcttaagaaaacaaactcttttttaaaaattacttttaaatattaactcaaaagttgagattttggggtggtggtgtgccaagacattaattttttttttaaacaatgaagtgaaaaagttttacaatctctaggtttggctagttctcttaacactggttaaattaacattgcataaacacttttcaagtctgatccatatttaataatgctttaaaataaaaataaaaacaatccttttgataaatttaaaatgttacttattttaaaataaatgaagtgagatggcatggtgaggtgaaagtatcactggactaggaagaaggtgacttaggttctagataggtgtcttttaggactctgattttgaggacatcacttactatccatttcttcatgttaaaagaagtcatctcaaactcttagttttttttttttacaactatgtaatttatattccatttacataaggatacacttatttgtcaagctcagcacaatctgtaaatttttaacctatgttacaccatcttcagtgccagtcttgggcaaaattgtgcaagaggtgaagtttatatttgaatatccattctcgttttaggactcttcttccatattagtgtcatcttgcctccctaccttccacatgccccatgacttgatgcagttttaatacttgtaattcccctaaccataagatttactgctgctgtggatatctccatgaagttttcccactgagtcacatcagaaatgccctacatcttatttcctcagggctcaagagaatctgacagataccataaagggatttgacctaatcactaattttcaggtggtggctgatgctttgaacatctctttgctgcccaatccattagcgacagtaggatttttcaaacctggtatgaatagacagaaccctatccagtggaaggagaatttaataaagatagtgctgaaagaattccttaggtaatctataactaggactactcctggtaacagtaatacattccattgttttagtaaccagaaatcttcatgcaatgaaaaatactttaattcatgaagcttactttttttttttggtgtcagagtctcgctcttgtcacccaggctggaatgcagtggcgccatctcagctcactgcaacctccatctcccaggttcaagcgattctcgtgcctcggcctcctgagtagctgggattacaggcgtgtgccactacactcaactaatttttgtatttttaggagagacggggtttcaccctgttggccaggctggtctcgaactcctgacctcaagtgattcacccaccttggcctcataaacctgttttgcagaactcatttattcagcaaatatttattgagtgcctaccagatgccagtcaccgcacaaggcactgggtatatggtatccccaaacaagagacataatcccggtccttaggtagtgctagtgtggtctgtaatatcttactaaggcctttggtatacgacccagagataacacgatgcgtattttagttttgcaaagaaggggtttggtctctgtgccagctctataattgttttgctacgattccactgaaactcttcgatcaagctactttatgtaaatcacttcattgttttaaaggaataaacttgattatattgtttttttatttggcataactgtgattcttttaggacaattactgtacacattaaggtgtatgtcagatattcatattgacccaaatgtgtaatattccagttttctctgcataagtaattaaaatatacttaaaaattaatagttttatctgggtacaaataaacaggtgcctgaactagttcacagacaaggaaacttctatgtaaaaatcactatgatttctgaattgctatgtgaaactacagatctttggaacactgtttaggtagggtgttaagacttacacagtacctcgtttctacacagagaaagaaatggccatacttcaggaactgcagtgcttatgaggggatatttaggcctcttgaatttttgatgtagatgggcatttttttaaggtagtggttaattacctttatgtgaactttgaatggtttaacaaaagatttgtttttgtagagattttaaagggggagaattctagaaataaatgttacctaattattacagccttaaagacaaaaatccttgttgaagtttttttaaaaaaagctaaattacatagacttaggcattaacatgtttgtggaagaatatagcagacgtatattgtatcatttgagtgaatgttcccaagtaggcattctaggctctatttaactgagtcacactgcataggaatttagaacctaacttttataggttatcaaaactgttgtcaccattgcacaattttgtcctaatatatacatagaaactttgtggggcatgttaagttacagtttgcacaagttcatctcatttgtattccattgattttttttttcttctaaacattttttcttcaaacagtatataactttttttaggggatttttttttagacagcaaaaactatctgaagatttccatttgtcaaaaagtaatgatttcttgataattgtgtagtaatgttttttagaacccagcagttaccttaaagctgaatttatatttagtaacttctgtgttaatactggatagcatgaattctgcattgagaaactgaatagctgtcataaaatgaaactttctttctaaagaaagatactcacatgagttcttgaagaatagtcataactagattaagatctgtgttttagtttaatagtttgaagtgcctgtttgggataatgataggtaatttagatgaatttaggggaaaaaaaagttatctgcagatatgttgagggcccatctctccccccacacccccacagagctaactgggttacagtgttttatccgaaagtttccaattccactgtcttgtgttttcatgttgaaaatacttttgcatttttcctttgagtgccaatttcttactagtactatttcttaatgtaacatgtttacctggaatgtattttaactatttttgtatagtgtaaactgaaacatgcacattttgtacattgtgctttcttttgtgggacatatgcagtgtgatccagttgttttccatcatttggttgcgctgacctaggaatgttggtcatatcaaacattaaaaatgaccactcttttaattgaaattaacttttaaatgtttataggagtatgtgctgtgaagtgatctaaaatttgtaatatttttgtcatgaactgtactactcctaattattgtaatgtaataaaaatagttacagtgacaaaaaaaaaaaaaaa

SEQ ID NO: 4 - protein, 188 aa, Homo sapiens [sequence omitted]

SEQ ID NO: 5 - RNA, 25 nt, Homo sapiens
  source 1..25: mol_type = other RNA
caggtcaagaggagtacagtgcaat

SEQ ID NO: 6 - RNA, 27 nt, Homo sapiens
  source 1..27: mol_type = other RNA
agcaggtcaagaggagtacagtgcaat

SEQ ID NO: 7 - RNA, 27 nt, Homo sapiens
  source 1..27: mol_type = other RNA
agcaggtcaagaggagtacagtgcata

SEQ ID NO: 8 - DNA, 25 bp, synthetic construct
  misc_feature 1..25: note = Description of Artificial Sequence: Syntheticoligonucleotide
  misc_feature 1..25: note = Description of Combined DNA/RNA Molecule: Syntheticoligonucleotide
  source 1..25: mol_type = other DNA
  modified_base order(1,2,7..9,11..14,19..20): mod_base = OTHER; note = Uracil
ttagcatttgttttagcattaccta

SEQ ID NO: 9 - RNA, 27 nt, synthetic construct
  misc_feature 1..27: note = Description of Artificial Sequence: Syntheticoligonucleotide
  source 1..27: mol_type = other RNA
tattagcatttgttttagcattaccta

SEQ ID NO: 10 - RNA, 27 nt, synthetic construct
  misc_feature 1..27: note = Description of Artificial Sequence: Syntheticoligonucleotide
  source 1..27: mol_type = other RNA
tattagcatttgttttagcattacccc

SEQ ID NO: 11 - RNA, 27 nt, synthetic construct
  misc_feature 1..27: note = Description of Artificial Sequence: Syntheticoligonucleotide
  source 1..27: mol_type = other RNA
tcttgcctacgccaccagctccaacta

SEQ ID NO: 12 - RNA, 27 nt, synthetic construct
  misc_feature 1..27: note = Description of Artificial Sequence: Syntheticoligonucleotide
  source 1..27: mol_type = other RNA
ctcttgacctgctgtgtcgagaatatc

SEQ ID NO: 13 - RNA, 27 nt, synthetic construct
  misc_feature 1..27: note = Description of Artificial Sequence: Syntheticoligonucleotide
  source 1..27: mol_type = other RNA
tcctcttgacctgctgtgtcgagaata

SEQ ID NO: 14 - RNA, 27 nt, synthetic construct
  misc_feature 1..27: note = Description of Artificial Sequence: Syntheticoligonucleotide
  source 1..27: mol_type = other RNA
attgcactgtactcctcttgacctgct

SEQ ID NO: 15 - RNA, 27 nt, synthetic construct
  misc_feature 1..27: note = Description of Artificial Sequence: Syntheticoligonucleotide
  source 1..27: mol_type = other RNA
tccctcattgcactgtactcctcttga

SEQ ID NO: 16 - RNA, 27 nt, synthetic construct
  misc_feature 1..27: note = Description of Artificial Sequence: Syntheticoligonucleotide
  source 1..27: mol_type = other RNA
catgtactggtccctcattgcactgta

SEQ ID NO: 17 - RNA, 27 nt, synthetic construct
  misc_feature 1..27: note = Description of Artificial Sequence: Syntheticoligonucleotide
  source 1..27: mol_type = other RNA
aaatacacaaagaaagccctccccagt

SEQ ID NO: 18 - RNA, 27 nt, synthetic construct
  misc_feature 1..27: note = Description of Artificial Sequence: Syntheticoligonucleotide
  source 1..27: mol_type = other RNA
ggcaaatacacaaagaaagccctcccc

SEQ ID NO: 19 - RNA, 27 nt, synthetic construct
  misc_feature 1..27: note = Description of Artificial Sequence: Syntheticoligonucleotide
  source 1..27: mol_type = other RNA
atggcaaatacacaaagaaagccctcc

SEQ ID NO: 20 - RNA, 27 nt, synthetic construct
  misc_feature 1..27: note = Description of Artificial Sequence: Syntheticoligonucleotide
  source 1..27: mol_type = other RNA
atttatggcaaatacacaaagaaagcc

SEQ ID NO: 21 - RNA, 27 nt, synthetic construct
  misc_feature 1..27: note = Description of Artificial Sequence: Syntheticoligonucleotide
  source 1..27: mol_type = other RNA
gtattatttatggcaaatacacaaaga

SEQ ID NO: 22 - RNA, 27 nt, synthetic construct
  misc_feature 1..27: note = Description of Artificial Sequence: Syntheticoligonucleotide
  source 1..27: mol_type = other RNA
agtattatttatggcaaatacacaaag

SEQ ID NO: 23 - RNA, 27 nt, synthetic construct
  misc_feature 1..27: note = Description of Artificial Sequence: Syntheticoligonucleotide
  source 1..27: mol_type = other RNA
tagtattatttatggcaaatacacaaa

SEQ ID NO: 24 - RNA, 27 nt, synthetic construct
  misc_feature 1..27: note = Description of Artificial Sequence: Syntheticoligonucleotide
  source 1..27: mol_type = other RNA
ttagtattatttatggcaaatacacaa

SEQ ID NO: 25 - RNA, 27 nt, synthetic construct
  misc_feature 1..27: note = Description of Artificial Sequence: Syntheticoligonucleotide
  source 1..27: mol_type = other RNA
tttagtattatttatggcaaatacaca

SEQ ID NO: 26 - RNA, 27 nt, synthetic construct
  misc_feature 1..27: note = Description of Artificial Sequence: Syntheticoligonucleotide
  source 1..27: mol_type = other RNA
atttagtattatttatggcaaatacac

SEQ ID NO: 27 - RNA, 27 nt, synthetic construct
  misc_feature 1..27: note = Description of Artificial Sequence: Syntheticoligonucleotide
  source 1..27: mol_type = other RNA
cttcaaatgatttagtattatttatgg

SEQ ID NO: 28 - RNA, 27 nt, synthetic construct
  misc_feature 1..27: note = Description of Artificial Sequence: Syntheticoligonucleotide
  source 1..27: mol_type = other RNA
aatatcttcaaatgatttagtattatt

SEQ ID NO: 29 - RNA, 27 nt, synthetic construct
  misc_feature 1..27: note = Description of Artificial Sequence: Syntheticoligonucleotide
  source 1..27: mol_type = other RNA
ggtgaatatcttcaaatgatttagtat

SEQ ID NO: 30 - RNA, 27 nt, synthetic construct
  misc_feature 1..27: note = Description of Artificial Sequence: Syntheticoligonucleotide
  source 1..27: mol_type = other RNA
atggtgaatatcttcaaatgatttagt

SEQ ID NO: 31 - RNA, 27 nt, synthetic construct
  misc_feature 1..27: note = Description of Artificial Sequence: Syntheticoligonucleotide
  source 1..27: mol_type = other RNA
ctataatggtgaatatcttcaaatgat

SEQ ID NO: 32 - RNA, 27 nt, synthetic construct
  misc_feature 1..27: note = Description of Artificial Sequence: Syntheticoligonucleotide
  source 1..27: mol_type = other RNA
gttctctataatggtgaatatcttcaa

SEQ ID NO: 33 - RNA, 27 nt, synthetic construct
  misc_feature 1..27: note = Description of Artificial Sequence: Syntheticoligonucleotide
  source 1..27: mol_type = other RNA
ttgttctctataatggtgaatatcttc

SEQ ID NO: 34 - RNA, 27 nt, synthetic construct
  misc_feature 1..27: note = Description of Artificial Sequence: Syntheticoligonucleotide
  source 1..27: mol_type = other RNA
catttatttcctactaggaccataggt

SEQ ID NO: 35 - RNA, 27 nt, synthetic construct
  misc_feature 1..27: note = Description of Artificial Sequence: Syntheticoligonucleotide
  source 1..27: mol_type = other RNA
tgtctactgttctagaaggcaaatcac

SEQ ID NO: 36 - RNA, 27 nt, synthetic construct
  misc_feature 1..27: note = Description of Artificial Sequence: Syntheticoligonucleotide
  source 1..27: mol_type = other RNA
gaactaatgtatagaaggcatcatcaa

SEQ ID NO: 37 - RNA, 27 nt, synthetic construct
  misc_feature 1..27: note = Description of Artificial Sequence: Syntheticoligonucleotide
  source 1..27: mol_type = other RNA
tgttttcgaatttctcgaactaatgta

SEQ ID NO: 38 - RNA, 27 nt, synthetic construct
  misc_feature 1..27: note = Description of Artificial Sequence: Syntheticoligonucleotide
  source 1..27: mol_type = other RNA
cttttctttatgttttcgaatttctcg

SEQ ID NO: 39 - RNA, 27 nt, synthetic construct
  misc_feature 1..27: note = Description of Artificial Sequence: Syntheticoligonucleotide
  source 1..27: mol_type = other RNA
tttgctcatcttttctttatgttttcg

SEQ ID NO: 40 - RNA, 27 nt, synthetic construct
  misc_feature 1..27: note = Description of Artificial Sequence: Syntheticoligonucleotide
  source 1..27: mol_type = other RNA
ccatctttgctcatcttttctttatgt

SEQ ID NO: 41 - RNA, 27 nt, synthetic construct
  misc_feature 1..27: note = Description of Artificial Sequence: Syntheticoligonucleotide
  source 1..27: mol_type = other RNA
gctaataatttagtgtaatgtacaaaa

SEQ ID NO: 42 - RNA, 27 nt, synthetic construct
  misc_feature 1..27: note = Description of Artificial Sequence: Syntheticoligonucleotide
  source 1..27: mol_type = other RNA
aatgctaaaacaaatgctaataattta

SEQ ID NO: 43 - RNA, 27 nt, synthetic construct
  misc_feature 1..27: note = Description of Artificial Sequence: Syntheticoligonucleotide
  source 1..27: mol_type = other RNA
taggtaatgctaaaacaaatgctaata

SEQ ID NO: 44 - RNA, 27 nt, synthetic construct
  misc_feature 1..27: note = Description of Artificial Sequence: Syntheticoligonucleotide
  source 1..27: mol_type = other RNA
ctggcacttagaggaaaaaaaaacttc

SEQ ID NO: 45 - RNA, 27 nt, synthetic construct
  misc_feature 1..27: note = Description of Artificial Sequence: Syntheticoligonucleotide
  source 1..27: mol_type = other RNA
caaaactctgggaatactggcacttag

SEQ ID NO: 46 - RNA, 27 nt, synthetic construct
  misc_feature 1..27: note = Description of Artificial Sequence: Syntheticoligonucleotide
  source 1..27: mol_type = other RNA
aagcttcattaatttgtttcacaccaa

SEQ ID NO: 47 - RNA, 27 nt, synthetic construct
  misc_feature 1..27: note = Description of Artificial Sequence: Syntheticoligonucleotide
  source 1..27: mol_type = other RNA
gtctcaactgaaattagtaattaatcc

SEQ ID NO: 48 - RNA, 27 nt, synthetic construct
  misc_feature 1..27: note = Description of Artificial Sequence: Syntheticoligonucleotide
  source 1..27: mol_type = other RNA
aaaaatttagtagcatgtaaatatagc

SEQ ID NO: 49 - RNA, 27 nt, synthetic construct
  misc_feature 1..27: note = Description of Artificial Sequence: Syntheticoligonucleotide
  source 1..27: mol_type = other RNA
tttacactatacaaaaatagttaaaat

SEQ ID NO: 50 - RNA, 27 nt, synthetic construct
  misc_feature 1..27: note = Description of Artificial Sequence: Syntheticoligonucleotide
  source 1..27: mol_type = other RNA
gatggaaaacaactggatcacactgca

SEQ ID NO: 51 - DNA, 21 bp, synthetic construct
  misc_feature 1..21: note = Description of Artificial Sequence: Syntheticoligonucleotide
  misc_feature 1..21: note = Description of Combined DNA/RNA Molecule: Syntheticoligonucleotide
  source 1..21: mol_type = other DNA
  modified_base order(2,14): mod_base = OTHER; note = Uracil
ctacgccaccagctccaactt

SEQ ID NO: 52 - DNA, 21 bp, synthetic construct
  misc_feature 1..21: note = Description of Artificial Sequence: Syntheticoligonucleotide
  misc_feature 1..21: note = Description of Combined DNA/RNA Molecule: Syntheticoligonucleotide
  source 1..21: mol_type = other DNA
  modified_base order(4,7,9,11,18): mod_base = OTHER; note = Uracil
acctgctgtgtcgagaatatt

SEQ ID NO: 53 - DNA, 21 bp, synthetic construct
  misc_feature 1..21: note = Description of Artificial Sequence: Syntheticoligonucleotide
  misc_feature 1..21: note = Description of Combined DNA/RNA Molecule: Syntheticoligonucleotide
  source 1..21: mol_type = other DNA
  modified_base order(1,6,9,11,13): mod_base = OTHER; note = Uracil
tgacctgctgtgtcgagaatt

SEQ ID NO: 54 - DNA, 21 bp, synthetic construct
  misc_feature 1..21: note = Description of Artificial Sequence: Syntheticoligonucleotide
  misc_feature 1..21: note = Description of Combined DNA/RNA Molecule: Syntheticoligonucleotide
  source 1..21: mol_type = other DNA
  modified_base order(2,4,7,10,12,13,18): mod_base = OTHER; note = Uracil
ctgtactcctcttgacctgtt

SEQ ID NO: 55 - DNA, 21 bp, synthetic construct
  misc_feature 1..21: note = Description of Artificial Sequence: Syntheticoligonucleotide
  misc_feature 1..21: note = Description of Combined DNA/RNA Molecule: Syntheticoligonucleotide
  source 1..21: mol_type = other DNA
  modified_base order(2,3,8,10,13,16,18,19): mod_base = OTHER; note = Uracil
attgcactgtactcctctttt

SEQ ID NO: 56 - DNA, 21 bp, synthetic construct
  misc_feature 1..21: note = Description of Artificial Sequence: Syntheticoligonucleotide
  misc_feature 1..21: note = Description of Combined DNA/RNA Molecule: Syntheticoligonucleotide
  source 1..21: mol_type = other DNA
  modified_base order(2,5,9,12,13,18): mod_base = OTHER; note = Uracil
ctggtccctcattgcactgtt

SEQ ID NO: 57 - DNA, 21 bp, synthetic construct
  misc_feature 1..21: note = Description of Artificial Sequence: Syntheticoligonucleotide
  misc_feature 1..21: note = Description of Combined DNA/RNA Molecule: Syntheticoligonucleotide
  source 1..21: mol_type = other DNA
  modified_base 14: mod_base = OTHER; note = Uracil
acaaagaaagccctccccatt

SEQ ID NO: 58 - DNA, 21 bp, synthetic construct
  misc_feature 1..21: note = Description of Artificial Sequence: Syntheticoligonucleotide
  misc_feature 1..21: note = Description of Combined DNA/RNA Molecule: Syntheticoligonucleotide
  source 1..21: mol_type = other DNA
  modified_base order(3,19): mod_base = OTHER; note = Uracil
aatacacaaagaaagcccttt

SEQ ID NO: 59 - DNA, 21 bp, synthetic construct
  misc_feature 1..21: note = Description of Artificial Sequence: Syntheticoligonucleotide
  misc_feature 1..21: note = Description of Combined DNA/RNA Molecule: Syntheticoligonucleotide
  source 1..21: mol_type = other DNA
  modified_base 4: mod_base = OTHER; note = Uracil
aaatacacaaagaaagccctt

SEQ ID NO: 60 - DNA, 21 bp, synthetic construct
  misc_feature 1..21: note = Description of Artificial Sequence: Syntheticoligonucleotide
  misc_feature 1..21: note = Description of Combined DNA/RNA Molecule: Syntheticoligonucleotide
  source 1..21: mol_type = other DNA
  modified_base 7: mod_base = OTHER; note = Uracil
ggcaaatacacaaagaaagtt

SEQ ID NO: 61 - DNA, 21 bp, synthetic construct
  misc_feature 1..21: note = Description of Artificial Sequence: Syntheticoligonucleotide
  misc_feature 1..21: note = Description of Combined DNA/RNA Molecule: Syntheticoligonucleotide
  source 1..21: mol_type = other DNA
  modified_base order(1,2,3,5,12): mod_base = OTHER; note = Uracil
tttatggcaaatacacaaatt

SEQ ID NO: 62 - DNA, 21 bp, synthetic construct
  misc_feature 1..21: note = Description of Artificial Sequence: Syntheticoligonucleotide
  misc_feature 1..21: note = Description of Combined DNA/RNA Molecule: Syntheticoligonucleotide
  source 1..21: mol_type = other DNA
  modified_base order(2,3,4,6,13): mod_base = OTHER; note = Uracil
atttatggcaaatacacaatt

SEQ ID NO: 63 - DNA, 21 bp, synthetic construct
  misc_feature 1..21: note = Description of Artificial Sequence: Syntheticoligonucleotide
  misc_feature 1..21: note = Description of Combined DNA/RNA Molecule: Syntheticoligonucleotide
  source 1..21: mol_type = other DNA
  modified_base order(1,3,4,5,7,14): mod_base = OTHER; note = Uracil
tatttatggcaaatacacatt

SEQ ID NO: 64 - DNA, 21 bp, synthetic construct
  misc_feature 1..21: note = Description of Artificial Sequence: Syntheticoligonucleotide
  misc_feature 1..21: note = Description of Combined DNA/RNA Molecule: Syntheticoligonucleotide
  source 1..21: mol_type = other DNA
  modified_base order(1,2,4,5,6,8,15): mod_base = OTHER; note = Uracil
ttatttatggcaaatacactt

SEQ ID NO: 65 - DNA, 21 bp, synthetic construct
  misc_feature 1..21: note = Description of Artificial Sequence: Syntheticoligonucleotide
  misc_feature 1..21: note = Description of Combined DNA/RNA Molecule: Syntheticoligonucleotide
  source 1..21: mol_type = other DNA
  modified_base order(2,3,5,6,7,9,16): mod_base = OTHER; note = Uracil
attatttatggcaaatacatt

SEQ ID NO: 66 - DNA, 21 bp, synthetic construct
  misc_feature 1..21: note = Description of Artificial Sequence: Syntheticoligonucleotide
  misc_feature 1..21: note = Description of Combined DNA/RNA Molecule: Syntheticoligonucleotide
  source 1..21: mol_type = other DNA
  modified_base order(1,3,4,6,7,8,10,17): mod_base = OTHER; note = Uracil
tattatttatggcaaatactt

SEQ ID NO: 67 - DNA, 21 bp, synthetic construct
  misc_feature 1..21: note = Description of Artificial Sequence: Syntheticoligonucleotide
  misc_feature 1..21: note = Description of Combined DNA/RNA Molecule: Syntheticoligonucleotide
  source 1..21: mol_type = other DNA
  modified_base order(2,5,6,7,10,12,13,15,16,17,19): mod_base = OTHER; note = Uracil
atgatttagtattatttattt

SEQ ID NO: 68 - DNA, 21 bp, synthetic construct
  misc_feature 1..21: note = Description of Artificial Sequence: Syntheticoligonucleotide
  misc_feature 1..21: note = Description of Combined DNA/RNA Molecule: Syntheticoligonucleotide
  source 1..21: mol_type = other DNA
  modified_base order(1,2,7,10,11,12,15,17,18): mod_base = OTHER; note = Uracil
ttcaaatgatttagtattatt

SEQ ID NO: 69 - DNA, 21 bp, synthetic construct
  misc_feature 1..21: note = Description of Artificial Sequence: Syntheticoligonucleotide
  misc_feature 1..21: note = Description of Combined DNA/RNA Molecule: Syntheticoligonucleotide
  source 1..21: mol_type = other DNA
  modified_base order(1,3,5,6,11,14,15,16,19): mod_base = OTHER; note = Uracil
tatcttcaaatgatttagttt

SEQ ID NO: 70 - DNA, 21 bp, synthetic construct
  misc_feature 1..21: note = Description of Artificial Sequence: Syntheticoligonucleotide
  misc_feature 1..21: note = Description of Combined DNA/RNA Molecule: Syntheticoligonucleotide
  source 1..21: mol_type = other DNA
  modified_base order(3,5,7,8,13,16,17,18): mod_base = OTHER; note = Uracil
aatatcttcaaatgatttatt

SEQ ID NO: 71 - DNA, 21 bp, synthetic construct
  misc_feature 1..21: note = Description of Artificial Sequence: Syntheticoligonucleotide
  misc_feature 1..21: note = Description of Combined DNA/RNA Molecule: Syntheticoligonucleotide
  source 1..21: mol_type = other DNA
  modified_base order(1,4,8,10,12,13,18): mod_base = OTHER; note = Uracil
tggtgaatatcttcaaatgtt

SEQ ID NO: 72 - DNA, 21 bp, synthetic construct
  misc_feature 1..21: note = Description of Artificial Sequence: Syntheticoligonucleotide
  misc_feature 1..21: note = Description of Combined DNA/RNA Molecule: Syntheticoligonucleotide
  source 1..21: mol_type = other DNA
  modified_base order(1,3,6,9,13,15,17,18): mod_base = OTHER; note = Uracil
tataatggtgaatatcttctt

SEQ ID NO: 73 - DNA, 21 bp, synthetic construct
  misc_feature 1..21: note = Description of Artificial Sequence: Syntheticoligonucleotide
  misc_feature 1..21: note = Description of Combined DNA/RNA Molecule: Syntheticoligonucleotide
  source 1..21: mol_type = other DNA
  modified_base order(1,3,5,8,11,15,17,19): mod_base = OTHER; note = Uracil
tctataatggtgaatatcttt

SEQ ID NO: 74 - DNA, 21 bp, synthetic construct
  misc_feature 1..21: note = Description of Artificial Sequence: Syntheticoligonucleotide
  misc_feature 1..21: note = Description of Combined DNA/RNA Molecule: Syntheticoligonucleotide
  source 1..21: mol_type = other DNA
  modified_base order(1,2,3,6,9,17): mod_base = OTHER; note = Uracil
tttcctactaggaccatagtt

SEQ ID NO: 75 - DNA, 21 bp, synthetic construct
  misc_feature 1..21: note = Description of Artificial Sequence: Syntheticoligonucleotide
  misc_feature 1..21: note = Description of Combined DNA/RNA Molecule: Syntheticoligonucleotide
  source 1..21: mol_type = other DNA
  modified_base order(2,4,5,7,18): mod_base = OTHER; note = Uracil
ctgttctagaaggcaaatctt

SEQ ID NO: 76 - DNA, 21 bp, synthetic construct
  misc_feature 1..21: note = Description of Artificial Sequence: Syntheticoligonucleotide
  misc_feature 1..21: note = Description of Combined DNA/RNA Molecule: Syntheticoligonucleotide
  source 1..21: mol_type = other DNA
  modified_base order(2,4,6,15,18): mod_base = OTHER; note = Uracil
atgtatagaaggcatcatctt

SEQ ID NO: 77 - DNA, 21 bp, synthetic construct
  misc_feature 1..21: note = Description of Artificial Sequence: Syntheticoligonucleotide
  misc_feature 1..21: note = Description of Combined DNA/RNA Molecule: Syntheticoligonucleotide
  source 1..21: mol_type = other DNA
  modified_base order(5,6,7,9,15,18): mod_base = OTHER; note = Uracil
cgaatttctcgaactaatgtt

SEQ ID NO: 78 - DNA, 21 bp, synthetic construct
  misc_feature 1..21: note = Description of Artificial Sequence: Syntheticoligonucleotide
  misc_feature 1..21: note = Description of Combined DNA/RNA Molecule: Syntheticoligonucleotide
  source 1..21: mol_type = other DNA
  modified_base order(1,2,3,5,7,8,9,10,15,16,17,19): mod_base = OTHER; note = Uracil
tttatgttttcgaatttcttt

SEQ ID NO: 79 - DNA, 21 bp, synthetic construct
  misc_feature 1..21: note = Description of Artificial Sequence: Syntheticoligonucleotide
  misc_feature 1..21: note = Description of Combined DNA/RNA Molecule: Syntheticoligonucleotide
  source 1..21: mol_type = other DNA
  modified_base order(3,5,6,7,8,10,11,12,14,16,17,18,19): mod_base = OTHER; note = Uracil
catcttttctttatgtttttt

SEQ ID NO: 80 - DNA, 21 bp, synthetic construct
  misc_feature 1..21: note = Description of Artificial Sequence: Syntheticoligonucleotide
  misc_feature 1..21: note = Description of Combined DNA/RNA Molecule: Syntheticoligonucleotide
  source 1..21: mol_type = other DNA
  modified_base order(1,2,5,8,10,11,12,13,15,16,17,19): mod_base = OTHER; note = Uracil
ttgctcatcttttctttattt

SEQ ID NO: 81 - DNA, 21 bp, synthetic construct
  misc_feature 1..21: note = Description of Artificial Sequence: Syntheticoligonucleotide
  misc_feature 1..21: note = Description of Combined DNA/RNA Molecule: Syntheticoligonucleotide
  source 1..21: mol_type = other DNA
  modified_base order(3,4,5,8,10,13,15): mod_base = OTHER; note = Uracil
aatttagtgtaatgtacaatt

SEQ ID NO: 82 - DNA, 21 bp, synthetic construct
  misc_feature 1..21: note = Description of Artificial Sequence: Syntheticoligonucleotide
  misc_feature 1..21: note = Description of Combined DNA/RNA Molecule: Syntheticoligonucleotide
  source 1..21: mol_type = other DNA
  modified_base order(9,12,15,18,19): mod_base = OTHER; note = Uracil
aaaacaaatgctaataatttt

SEQ ID NO: 83 - DNA, 21 bp, synthetic construct
  misc_feature 1..21: note = Description of Artificial Sequence: Syntheticoligonucleotide
  misc_feature 1..21: note = Description of Combined DNA/RNA Molecule: Syntheticoligonucleotide
  source 1..21: mol_type = other DNA
  modified_base order(2,5,14,17): mod_base = OTHER; note = Uracil
atgctaaaacaaatgctaatt

SEQ ID NO: 84 - DNA, 21 bp, synthetic construct
  misc_feature 1..21: note = Description of Artificial Sequence: Syntheticoligonucleotide
  misc_feature 1..21: note = Description of Combined DNA/RNA Molecule: Syntheticoligonucleotide
  source 1..21: mol_type = other DNA
  modified_base order(2,3,19): mod_base = OTHER; note = Uracil
cttagaggaaaaaaaaacttt

SEQ ID NO: 85 - DNA, 21 bp, synthetic construct
  misc_feature 1..21: note = Description of Artificial Sequence: Syntheticoligonucleotide
  misc_feature 1..21: note = Description of Combined DNA/RNA Molecule: Syntheticoligonucleotide
  source 1..21: mol_type = other DNA
  modified_base order(1,3,9,12,18,19): mod_base = OTHER; note = Uracil
tctgggaatactggcactttt

SEQ ID NO: 86 - DNA, 21 bp, synthetic construct
  misc_feature 1..21: note = Description of Artificial Sequence: Syntheticoligonucleotide
  misc_feature 1..21: note = Description of Combined DNA/RNA Molecule: Syntheticoligonucleotide
  source 1..21: mol_type = other DNA
  modified_base order(3,4,7,8,9,11,12,13): mod_base = OTHER; note = Uracil
cattaatttgtttcacacctt

SEQ ID NO: 87 - DNA, 21 bp, synthetic construct
  misc_feature 1..21: note = Description of Artificial Sequence: Syntheticoligonucleotide
  misc_feature 1..21: note = Description of Combined DNA/RNA Molecule: Syntheticoligonucleotide
  source 1..21: mol_type = other DNA
  modified_base order(3,8,9,12,15,16,19): mod_base = OTHER; note = Uracil
actgaaattagtaattaattt

SEQ ID NO: 88 - DNA, 21 bp, synthetic construct
  misc_feature 1..21: note = Description of Artificial Sequence: Syntheticoligonucleotide
  misc_feature 1..21: note = Description of Combined DNA/RNA Molecule: Syntheticoligonucleotide
  source 1..21: mol_type = other DNA
  modified_base order(1,2,5,10,12,16,18): mod_base = OTHER; note = Uracil
ttagtagcatgtaaatatatt

SEQ ID NO: 89 - DNA, 21 bp, synthetic construct
  misc_feature 1..21: note = Description of Artificial Sequence: Syntheticoligonucleotide
  misc_feature 1..21: note = Description of Combined DNA/RNA Molecule: Syntheticoligonucleotide
  source 1..21: mol_type = other DNA
  modified_base order(2,4,12,15,16): mod_base = OTHER; note = Uracil
ctatacaaaaatagttaaatt

SEQ ID NO: 90 - DNA, 21 bp, synthetic construct
  misc_feature 1..21: note = Description of Artificial Sequence: Syntheticoligonucleotide
  misc_feature 1..21: note = Description of Combined DNA/RNA Molecule: Syntheticoligonucleotide
  source 1..21: mol_type = other DNA
  modified_base order(8,12,18): mod_base = OTHER; note = Uracil
aaacaactggatcacactgtt

SEQ ID NO: 91 - RNA, 25 nt, synthetic construct
  misc_feature 1..25: note = Description of Artificial Sequence: Syntheticoligonucleotide
  source 1..25: mol_type = other RNA
gttggagctggtggcgtaggcaaga

SEQ ID NO: 92 - RNA, 25 nt, synthetic construct
  misc_feature 1..25: note = Description of Artificial Sequence: Syntheticoligonucleotide
  source 1..25: mol_type = other RNA
tattctcgacacagcaggtcaagag

SEQ ID NO: 93 - RNA, 25 nt, synthetic construct
  misc_feature 1..25: note = Description of Artificial Sequence: Syntheticoligonucleotide
  source 1..25: mol_type = other RNA
ttctcgacacagcaggtcaagagga

SEQ ID NO: 94 - RNA, 25 nt, synthetic construct
  misc_feature 1..25: note = Description of Artificial Sequence: Syntheticoligonucleotide
  source 1..25: mol_type = other RNA
aagaggagtacagtgcaatgaggga

SEQ ID NO: 95 - DNA, 25 bp, synthetic construct
  misc_feature 1..25: note = Description of Artificial Sequence: Syntheticoligonucleotide
  misc_feature 1..25: note = Description of Combined DNA/RNA Molecule: Syntheticoligonucleotide
  source 1..25: mol_type = other DNA
  modified_base order(4,9,20): mod_base = OTHER; note = Uracil
cagtgcaatgagggaccagtacatg

SEQ ID NO: 96 - DNA, 25 bp, synthetic construct
  misc_feature 1..25: note = Description of Artificial Sequence: Syntheticoligonucleotide
  misc_feature 1..25: note = Description of Combined DNA/RNA Molecule: Syntheticoligonucleotide
  source 1..25: mol_type = other DNA
  modified_base order(1,11,12,13,15,16,17,19,21,23): mod_base = OTHER; note = Uracil
tggggagggctttctttgtgtattt

SEQ ID NO: 97 - RNA, 25 nt, synthetic construct
  misc_feature 1..25: note = Description of Artificial Sequence: Syntheticoligonucleotide
  source 1..25: mol_type = other RNA
ggagggctttctttgtgtatttgcc

SEQ ID NO: 98 - DNA, 25 bp, synthetic construct
  misc_feature 1..25: note = Description of Artificial Sequence: Syntheticoligonucleotide
  misc_feature 1..25: note = Description of Combined DNA/RNA Molecule: Syntheticoligonucleotide
  source 1..25: mol_type = other DNA
  modified_base order(6,7,8,10,11,12,14,16,18,19,20): mod_base = OTHER; note = Uracil
agggctttctttgtgtatttgccat

SEQ ID NO: 99 - DNA, 25 bp, synthetic construct
  misc_feature 1..25: note = Description of Artificial Sequence: Syntheticoligonucleotide
  misc_feature 1..25: note = Description of Combined DNA/RNA Molecule: Syntheticoligonucleotide
  source 1..25: mol_type = other DNA
  modified_base order(2,3,4,6,7,8,10,12,14,15,16,21): mod_base = OTHER; note = Uracil
ctttctttgtgtatttgccataaat

SEQ ID NO: 100 - RNA, 25 nt, synthetic construct
  misc_feature 1..25: note = Description of Artificial Sequence: Syntheticoligonucleotide
  source 1..25: mol_type = other RNA
tttgtgtatttgccataaataatac

SEQ ID NO: 101 - DNA, 25 bp, synthetic construct
  misc_feature 1..25: note = Description of Artificial Sequence: Syntheticoligonucleotide
  misc_feature 1..25: note = Description of Combined DNA/RNA Molecule: Syntheticoligonucleotide
  source 1..25: mol_type = other DNA
  modified_base order(1,2,4,6,8,9,10,15,19,22): mod_base = OTHER; note = Uracil
ttgtgtatttgccataaataatact

SEQ ID NO: 102 - DNA, 25 bp, synthetic construct
  misc_feature 1..25: note = Description of Artificial Sequence: Syntheticoligonucleotide
  misc_feature 1..25: note = Description of Combined DNA/RNA Molecule: Syntheticoligonucleotide
  source 1..25: mol_type = other DNA
  modified_base order(1,3,5,7,8,9,14,18,21): mod_base = OTHER; note = Uracil
tgtgtatttgccataaataatacta

SEQ ID NO: 103 - RNA, 25 nt, synthetic construct
  misc_feature 1..25: note = Description of Artificial Sequence: Syntheticoligonucleotide
  source 1..25: mol_type = other RNA
gtgtatttgccataaataatactaa

SEQ ID NO: 104 - RNA, 25 nt, synthetic construct
  misc_feature 1..25: note = Description of Artificial Sequence: Syntheticoligonucleotide
  source 1..25: mol_type = other RNA
tgtatttgccataaataatactaaa

SEQ ID NO: 105 - DNA, 25 bp, synthetic construct
  misc_feature 1..25: note = Description of Artificial Sequence: Syntheticoligonucleotide
  misc_feature 1..25: note = Description of Combined DNA/RNA Molecule: Syntheticoligonucleotide
  source 1..25: mol_type = other DNA
  modified_base order(2,4,5,6,11,15,18,21): mod_base = OTHER; note = Uracil
gtatttgccataaataatactaaat

SEQ ID NO: 106 - RNA, 25 nt, synthetic construct
  misc_feature 1..25: note = Description of Artificial Sequence: Syntheticoligonucleotide
  source 1..25: mol_type = other RNA
ataaataatactaaatcatttgaag

SEQ ID NO: 107 - DNA, 25 bp, synthetic construct
  misc_feature 1..25: note = Description of Artificial Sequence: Syntheticoligonucleotide
  misc_feature 1..25: note = Description of Combined DNA/RNA Molecule: Syntheticoligonucleotide
  source 1..25: mol_type = other DNA
  modified_base order(1,4,7,11,14,15,16,22): mod_base = OTHER; note = Uracil
taatactaaatcatttgaagatatt

SEQ ID NO: 108 - RNA, 25 nt, synthetic construct
  misc_feature 1..25: note = Description of Artificial Sequence: Syntheticoligonucleotide
  source 1..25: mol_type = other RNA
actaaatcatttgaagatattcacc

SEQ ID NO: 109 - DNA, 25 bp, synthetic construct
  misc_feature 1..25: note = Description of Artificial Sequence: Syntheticoligonucleotide
  misc_feature 1..25: note = Description of Combined DNA/RNA Molecule: Syntheticoligonucleotide
  source 1..25: mol_type = other DNA
  modified_base order(1,5,8,9,10,16,18,19): mod_base = OTHER; note = Uracil
taaatcatttgaagatattcaccat

SEQ ID NO: 110 - RNA, 25 nt, synthetic construct
  misc_feature 1..25: note = Description of Artificial Sequence: Syntheticoligonucleotide
  source 1..25: mol_type = other RNA
catttgaagatattcaccattatag

SEQ ID NO: 111 - RNA, 25 nt, synthetic construct
  misc_feature 1..25: note = Description of Artificial Sequence: Syntheticoligonucleotide
  source 1..25: mol_type = other RNA
gaagatattcaccattatagagaac

SEQ ID NO: 112 - RNA, 25 nt, synthetic construct
  misc_feature 1..25: note = Description of Artificial Sequence: Syntheticoligonucleotide
  source 1..25: mol_type = other RNA
agatattcaccattatagagaacaa

SEQ ID NO: 113 - DNA, 25 bp, synthetic construct
  misc_feature 1..25: note = Description of Artificial Sequence: Syntheticoligonucleotide
  misc_feature 1..25: note = Description of Combined DNA/RNA Molecule: Syntheticoligonucleotide
  source 1..25: mol_type = other DNA
  modified_base order(2,4,7,10,13,20): mod_base = OTHER; note = Uracil
ctatggtcctagtaggaaataaatg

SEQ ID NO: 114 - RNA, 25 nt, synthetic construct
  misc_feature 1..25: note = Description of Artificial Sequence: Syntheticoligonucleotide
  source 1..25: mol_type = other RNA
gatttgccttctagaacagtagaca

SEQ ID NO: 115 - DNA, 25 bp, synthetic construct
  misc_feature 1..25: note = Description of Artificial Sequence: Syntheticoligonucleotide
  misc_feature 1..25: note = Description of Combined DNA/RNA Molecule: Syntheticoligonucleotide
  source 1..25: mol_type = other DNA
  modified_base order(3,6,10,11,13,15,19,20,23): mod_base = OTHER; note = Uracil
gatgatgccttctatacattagttc

SEQ ID NO: 116 - RNA, 25 nt, synthetic construct
  misc_feature 1..25: note = Description of Artificial Sequence: Syntheticoligonucleotide
  source 1..25: mol_type = other RNA
cattagttcgagaaattcgaaaaca

SEQ ID NO: 117 - RNA, 25 nt, synthetic construct
  misc_feature 1..25: note = Description of Artificial Sequence: Syntheticoligonucleotide
  source 1..25: mol_type = other RNA
agaaattcgaaaacataaagaaaag

SEQ ID NO: 118 - RNA, 25 nt, synthetic construct
  misc_feature 1..25: note = Description of Artificial Sequence: Syntheticoligonucleotide
  source 1..25: mol_type = other RNA
aaaacataaagaaaagatgagcaaa

SEQ ID NO: 119 - RNA, 25 nt, synthetic construct
  misc_feature 1..25: note = Description of Artificial Sequence: Syntheticoligonucleotide
  source 1..25: mol_type = other RNA
ataaagaaaagatgagcaaagatgg

SEQ ID NO: 120 - RNA, 25 nt, synthetic construct
  misc_feature 1..25: note = Description of Artificial Sequence: Syntheticoligonucleotide
  source 1..25: mol_type = other RNA
ttgtacattacactaaattattagc

SEQ ID NO: 121 - DNA, 25 bp, synthetic construct
  misc_feature 1..25: note = Description of Artificial Sequence: Syntheticoligonucleotide
  misc_feature 1..25: note = Description of Combined DNA/RNA Molecule: Syntheticoligonucleotide
  source 1..25: mol_type = other DNA
  modified_base order(3,4,6,7,12,13,14,16,17,18,19): mod_base = OTHER; note = Uracil
aattattagcatttgttttagcatt

SEQ ID NO: 122 - RNA, 25 nt, synthetic construct
  misc_feature 1..25: note = Description of Artificial Sequence: Syntheticoligonucleotide
  source 1..25: mol_type = other RNA
agtttttttttcctctaagtgccag

SEQ ID NO: 123 - DNA, 25 bp, synthetic construct
  misc_feature 1..25: note = Description of Artificial Sequence: Syntheticoligonucleotide
  misc_feature 1..25: note = Description of Combined DNA/RNA Molecule: Syntheticoligonucleotide
  source 1..25: mol_type = other DNA
  modified_base order(4,10,12,13,21,22,23): mod_base = OTHER; note = Uracil
aagtgccagtattcccagagttttg

SEQ ID NO: 124 - DNA, 25 bp, synthetic construct
  misc_feature 1..25: note = Description of Artificial Sequence: Syntheticoligonucleotide
  misc_feature 1..25: note = Description of Combined DNA/RNA Molecule: Syntheticoligonucleotide
  source 1..25: mol_type = other DNA
  modified_base order(3,5,14,15,18): mod_base = OTHER; note = Uracil
ggtgtgaaacaaattaatgaagctt

SEQ ID NO: 125 - RNA, 25 nt, synthetic construct
  misc_feature 1..25: note = Description of Artificial Sequence: Syntheticoligonucleotide
  source 1..25: mol_type = other RNA
attaattactaatttcagttgagac

SEQ ID NO: 126 - DNA, 25 bp, synthetic construct
  misc_feature 1..25: note = Description of Artificial Sequence: Syntheticoligonucleotide
  misc_feature 1..25: note = Description of Combined DNA/RNA Molecule: Syntheticoligonucleotide
  source 1..25: mol_type = other DNA
  modified_base order(1,3,5,6,7,11,14,17,21,22,23): mod_base = OTHER; note = Uracil
tatatttacatgctactaaattttt

SEQ ID NO: 127 - RNA, 25 nt, synthetic construct
  misc_feature 1..25: note = Description of Artificial Sequence: Syntheticoligonucleotide
  source 1..25: mol_type = other RNA
tttaactatttttgtatagtgtaaa

SEQ ID NO: 128 - DNA, 25 bp, synthetic construct
  misc_feature 1..25: note = Description of Artificial Sequence: Syntheticoligonucleotide
  misc_feature 1..25: note = Description of Combined DNA/RNA Molecule: Syntheticoligonucleotide
  source 1..25: mol_type = other DNA
  modified_base order(4,6,9,14,15,17,18,19,20): mod_base = OTHER; note = Uracil
cagtgtgatccagttgttttccatc

SEQ ID NO: 129 - RNA, 25 nt, synthetic construct
  misc_feature 1..25: note = Description of Artificial Sequence: Syntheticoligonucleotide
  source 1..25: mol_type = other RNA
gttggagctgttggcgtaggcaaga

SEQ ID NO: 130 - RNA, 25 nt, synthetic construct
  misc_feature 1..25: note = Description of Artificial Sequence: Syntheticoligonucleotide
  source 1..25: mol_type = other RNA
tattctcgacacagcaggtcatgag

SEQ ID NO: 131 - RNA, 25 nt, synthetic construct
  misc_feature 1..25: note = Description of Artificial Sequence: Syntheticoligonucleotide
  source 1..25: mol_type = other RNA
ttctcgacacagcaggtcatgagga

SEQ ID NO: 132 - DNA, 25 bp, synthetic construct
  misc_feature 1..25: note = Description of Artificial Sequence: Syntheticoligonucleotide
  source 1..25: mol_type = other DNA
  modified_base order(5,8,15,20,25): mod_base = OTHER; note = Uracil
caggtcatgaggagtacagtgcaat

SEQ ID NO: 133 - RNA, 25 nt, synthetic construct
  misc_feature 1..25: note = Description of Artificial Sequence: Syntheticoligonucleotide
  source 1..25: mol_type = other RNA
atgaggagtacagtgcaatgaggga

SEQ ID NO: 134 - RNA, 25 nt, synthetic construct
  misc_feature 1..25: note = Description of Artificial Sequence: Syntheticoligonucleotide
  source 1..25: mol_type = other RNA
ataaagaaaagatgagcaaagacgg

SEQ ID NO: 135 - RNA, 27 nt, synthetic construct
  misc_feature 1..27: note = Description of Artificial Sequence: Syntheticoligonucleotide
  source 1..27: mol_type = other RNA
tcttgcctacgccaacagctccaacta

SEQ ID NO: 136 - RNA, 27 nt, synthetic construct
  misc_feature 1..27: note = Description of Artificial Sequence: Syntheticoligonucleotide
  source 1..27: mol_type = other RNA
ctcatgacctgctgtgtcgagaatatc

SEQ ID NO: 137 - RNA, 27 nt, synthetic construct
  misc_feature 1..27: note = Description of Artificial Sequence: Syntheticoligonucleotide
  source 1..27: mol_type = other RNA
tcctcatgacctgctgtgtcgagaata

SEQ ID NO: 138 - RNA, 27 nt, synthetic construct
  misc_feature 1..27: note = Description of Artificial Sequence: Syntheticoligonucleotide
  source 1..27: mol_type = other RNA
attgcactgtactcctcatgacctgct

SEQ ID NO: 139 - RNA, 27 nt, synthetic construct
  misc_feature 1..27: note = Description of Artificial Sequence: Syntheticoligonucleotide
  source 1..27: mol_type = other RNA
tccctcattgcactgtactcctcatga

SEQ ID NO: 140 - RNA, 27 nt, synthetic construct
  misc_feature 1..27: note = Description of Artificial Sequence: Syntheticoligonucleotide
  source 1..27: mol_type = other RNA
ccgtctttgctcatcttttctttatgt

SEQ ID NO: 141 - DNA, 27 bp, Homo sapiens
  source 1..27: mol_type = other DNA
tagttggagctggtggcgtaggcaaga

SEQ ID NO: 142 - DNA, 27 bp, Homo sapiens
  source 1..27: mol_type = other DNA
tagttggagctgttggcgtaggcaaga

SEQ ID NO: 143 - DNA, 27 bp, Homo sapiens
  source 1..27: mol_type = other DNA
gatattctcgacacagcaggtcaagag

SEQ ID NO: 144 - DNA, 27 bp, Homo sapiens
  source 1..27: mol_type = other DNA
gatattctcgacacagcaggtcatgag

SEQ ID NO: 145 - DNA, 27 bp, Homo sapiens
  source 1..27: mol_type = other DNA
tattctcgacacagcaggtcaagagga

SEQ ID NO: 146 - DNA, 27 bp, Homo sapiens
  source 1..27: mol_type = other DNA
tattctcgacacagcaggtcatgagga

SEQ ID NO: 147 - DNA, 27 bp, Homo sapiens
  source 1..27: mol_type = other DNA
agcaggtcaagaggagtacagtgcaat

SEQ ID NO: 148 - DNA, 27 bp, Homo sapiens
  source 1..27: mol_type = other DNA
agcaggtcatgaggagtacagtgcaat

SEQ ID NO: 149 - DNA, 27 bp, Homo sapiens
  source 1..27: mol_type = other DNA
tcaagaggagtacagtgcaatgaggga

SEQ ID NO: 150 - DNA, 27 bp, Homo sapiens
  source 1..27: mol_type = other DNA
tcatgaggagtacagtgcaatgaggga

SEQ ID NO: 151 - DNA, 27 bp, Homo sapiens
  source 1..27: mol_type = other DNA
tacagtgcaatgagggaccagtacatg

SEQ ID NO: 152 - DNA, 27 bp, Homo sapiens
  source 1..27: mol_type = other DNA
actggggagggctttctttgtgtattt

SEQ ID NO: 153 - DNA, 27 bp, Homo sapiens
  source 1..27: mol_type = other DNA
ggggagggctttctttgtgtatttgcc

SEQ ID NO: 154 - DNA, 27 bp, Homo sapiens
  source 1..27: mol_type = other DNA
ggagggctttctttgtgtatttgccat

SEQ ID NO: 155 - DNA, 27 bp, Homo sapiens
  source 1..27: mol_type = other DNA
ggctttctttgtgtatttgccataaat

SEQ ID NO: 156 - DNA, 27 bp, Homo sapiens
  source 1..27: mol_type = other DNA
tctttgtgtatttgccataaataatac

SEQ ID NO: 157 - DNA, 27 bp, Homo sapiens
  source 1..27: mol_type = other DNA
ctttgtgtatttgccataaataatact

SEQ ID NO: 158 - DNA, 27 bp, Homo sapiens
  source 1..27: mol_type = other DNA
tttgtgtatttgccataaataatacta

SEQ ID NO: 159 - DNA, 27 bp, Homo sapiens
  source 1..27: mol_type = other DNA
ttgtgtatttgccataaataatactaa

SEQ ID NO: 160 - DNA, 27 bp, Homo sapiens
  source 1..27: mol_type = other DNA
tgtgtatttgccataaataatactaaa

SEQ ID NO: 161 - DNA, 27 bp, Homo sapiens
  source 1..27: mol_type = other DNA
gtgtatttgccataaataatactaaat

SEQ ID NO: 162 - DNA, 27 bp, Homo sapiens
  source 1..27: mol_type = other DNA
ccataaataatactaaatcatttgaag

SEQ ID NO: 163 - DNA, 27 bp, Homo sapiens
  source 1..27: mol_type = other DNA
aataatactaaatcatttgaagatatt

SEQ ID NO: 164 - DNA, 27 bp, Homo sapiens
  source 1..27: mol_type = other DNA
atactaaatcatttgaagatattcacc

SEQ ID NO: 165 - DNA, 27 bp, Homo sapiens
  source 1..27: mol_type = other DNA
actaaatcatttgaagatattcaccat

SEQ ID NO: 166 - DNA, 27 bp, Homo sapiens
  source 1..27: mol_type = other DNA
atcatttgaagatattcaccattatag

SEQ ID NO: 167 - DNA, 27 bp, Homo sapiens
  source 1..27: mol_type = other DNA
ttgaagatattcaccattatagagaac

SEQ ID NO: 168 - DNA, 27 bp, Homo sapiens
  source 1..27: mol_type = other DNA
gaagatattcaccattatagagaacaa

SEQ ID NO: 169 - DNA, 27 bp, Homo sapiens
  source 1..27: mol_type = other DNA
acctatggtcctagtaggaaataaatg

SEQ ID NO: 170 - DNA, 27 bp, Homo sapiens
  source 1..27: mol_type = other DNA
gtgatttgccttctagaacagtagaca

SEQ ID NO: 171 - DNA, 27 bp, Homo sapiens
  source 1..27: mol_type = other DNA
ttgatgatgccttctatacattagttc

SEQ ID NO: 172 - DNA, 27 bp, Homo sapiens
  source 1..27: mol_type = other DNA
tacattagttcgagaaattcgaaaaca

SEQ ID NO: 173 - DNA, 27 bp, Homo sapiens
  source 1..27: mol_type = other DNA
cgagaaattcgaaaacataaagaaaag

SEQ ID NO: 174 - DNA, 27 bp, Homo sapiens
  source 1..27: mol_type = other DNA
cgaaaacataaagaaaagatgagcaaa

SEQ ID NO: 175 - DNA, 27 bp, Homo sapiens
  source 1..27: mol_type = other DNA
acataaagaaaagatgagcaaagatgg

SEQ ID NO: 176 - DNA, 27 bp, Homo sapiens
  source 1..27: mol_type = other DNA
acataaagaaaagatgagcaaagacgg

SEQ ID NO: 177 - DNA, 27 bp, Homo sapiens
  source 1..27: mol_type = other DNA
ttttgtacattacactaaattattagc

SEQ ID NO: 178 - DNA, 27 bp, Homo sapiens
  source 1..27: mol_type = other DNA
taaattattagcatttgttttagcatt

SEQ ID NO: 179 - DNA, 27 bp, Homo sapiens
  source 1..27: mol_type = other DNA
tattagcatttgttttagcattaccta

SEQ ID NO: 180 - DNA, 27 bp, Homo sapiens
  source 1..27: mol_type = other DNA
gaagtttttttttcctctaagtgccag

SEQ ID NO: 181 - DNA, 27 bp, Homo sapiens
  source 1..27: mol_type = other DNA
ctaagtgccagtattcccagagttttg

SEQ ID NO: 182 - DNA, 27 bp, Homo sapiens
  source 1..27: mol_type = other DNA
ttggtgtgaaacaaattaatgaagctt

SEQ ID NO: 183 - DNA, 27 bp, Homo sapiens
  source 1..27: mol_type = other DNA
ggattaattactaatttcagttgagac

SEQ ID NO: 184 - DNA, 27 bp, Homo sapiens
  source 1..27: mol_type = other DNA
gctatatttacatgctactaaattttt

SEQ ID NO: 185 - DNA, 27 bp, Homo sapiens
  source 1..27: mol_type = other DNA
attttaactatttttgtatagtgtaaa

SEQ ID NO: 186 - DNA, 27 bp, Homo sapiens
  source 1..27: mol_type = other DNA
tgcagtgtgatccagttgttttccatc

SEQ ID NO: 187 - RNA, 27 nt, synthetic construct
  misc_feature 1..27: note = Description of Artificial Sequence: Syntheticoligonucleotide
  source 1..27: mol_type = other RNA
agcaggtcatgaggagtacagtgcaat

SEQ ID NO: 188 - RNA, 27 nt, synthetic construct
  misc_feature 1..27: note = Description of Artificial Sequence: Syntheticoligonucleotide
  source 1..27: mol_type = other RNA
agcaggtcatgaggagtacagtgcata

SEQ ID NO: 189 - RNA, 27 nt, synthetic construct
  misc_feature 1..27: note = Description of Artificial Sequence: Syntheticoligonucleotide
  source 1..27: mol_type = other RNA
caagtttatattcagtcattttcagca

SEQ ID NO: 190 - RNA, 27 nt, synthetic construct
  misc_feature 1..27: note = Description of Artificial Sequence: Syntheticoligonucleotide
  source 1..27: mol_type = other RNA
ctaccacaagtttatattcagtcattt

SEQ ID NO: 191 - RNA, 27 nt, synthetic construct
  misc_feature 1..27: note = Description of Artificial Sequence: Syntheticoligonucleotide
  source 1..27: mol_type = other RNA
ccaactaccacaagtttatattcagtc

SEQ ID NO: 192 - RNA, 27 nt, synthetic construct
  misc_feature 1..27: note = Description of Artificial Sequence: Syntheticoligonucleotide
  source 1..27: mol_type = other RNA
cgtccacaaaatgattctgaattagct

SEQ ID NO: 193 - RNA, 27 nt, synthetic construct
  misc_feature 1..27: note = Description of Artificial Sequence: Syntheticoligonucleotide
  source 1..27: mol_type = other RNA
aatcctctattgttggatcatattcgt

SEQ ID NO: 194 - RNA, 27 nt, synthetic construct
  misc_feature 1..27: note = Description of Artificial Sequence: Syntheticoligonucleotide
  source 1..27: mol_type = other RNA
aggtttctccatcaattactacttgct

SEQ ID NO: 195 - RNA, 27 nt, synthetic construct
  misc_feature 1..27: note = Description of Artificial Sequence: Syntheticoligonucleotide
  source 1..27: mol_type = other RNA
atggcaaatacacaaagaaagccctcc

SEQ ID NO: 196 - RNA, 27 nt, synthetic construct
  misc_feature 1..27: note = Description of Artificial Sequence: Syntheticoligonucleotide
  source 1..27: mol_type = other RNA
gtattatttatggcaaatacacaaaga

SEQ ID NO: 197 - RNA, 27 nt, synthetic construct
  misc_feature 1..27: note = Description of Artificial Sequence: Syntheticoligonucleotide
  source 1..27: mol_type = other RNA
agtattatttatggcaaatacacaaag

SEQ ID NO: 198 - RNA, 27 nt, synthetic construct
  misc_feature 1..27: note = Description of Artificial Sequence: Syntheticoligonucleotide
  source 1..27: mol_type = other RNA
tagtattatttatggcaaatacacaaa

SEQ ID NO: 199 - RNA, 27 nt, synthetic construct
  misc_feature 1..27: note = Description of Artificial Sequence: Syntheticoligonucleotide
  source 1..27: mol_type = other RNA
ttagtattatttatggcaaatacacaa

SEQ ID NO: 200 - RNA, 27 nt, synthetic construct
  misc_feature 1..27: note = Description of Artificial Sequence: Syntheticoligonucleotide
  source 1..27: mol_type = other RNA
tgatttagtattatttatggcaaatac

SEQ ID NO: 201 - RNA, 27 nt, synthetic construct
  misc_feature 1..27: note = Description of Artificial Sequence: Syntheticoligonucleotide
  source 1..27: mol_type = other RNA
atgatttagtattatttatggcaaata

SEQ ID NO: 202 - RNA, 27 nt, synthetic construct
  misc_feature 1..27: note = Description of Artificial Sequence: Syntheticoligonucleotide
  source 1..27: mol_type = other RNA
cttcaaatgatttagtattatttatgg

SEQ ID NO: 203 - RNA, 27 nt, synthetic construct
  misc_feature 1..27: note = Description of Artificial Sequence: Syntheticoligonucleotide
  source 1..27: mol_type = other RNA
tcttcaaatgatttagtattatttatg

SEQ ID NO: 204 - RNA, 27 nt, synthetic construct
  misc_feature 1..27: note = Description of Artificial Sequence: Syntheticoligonucleotide
  source 1..27: mol_type = other RNA
tatcttcaaatgatttagtattattta

SEQ ID NO: 205 - RNA, 27 nt, synthetic construct
  misc_feature 1..27: note = Description of Artificial Sequence: Syntheticoligonucleotide
  source 1..27: mol_type = other RNA
atatcttcaaatgatttagtattattt

SEQ ID NO: 206 - RNA, 27 nt, synthetic construct
  misc_feature 1..27: note = Description of Artificial Sequence: Syntheticoligonucleotide
  source 1..27: mol_type = other RNA
aatatcttcaaatgatttagtattatt

SEQ ID NO: 207 - RNA, 27 nt, synthetic construct
  misc_feature 1..27: note = Description of Artificial Sequence: Syntheticoligonucleotide
  source 1..27: mol_type = other RNA
gaatatcttcaaatgatttagtattat

SEQ ID NO: 208 - RNA, 27 nt, synthetic construct
  misc_feature 1..27: note = Description of Artificial Sequence: Syntheticoligonucleotide
  source 1..27: mol_type = other RNA
tctctataatggtgaatatcttcaaat

SEQ ID NO: 209 - RNA, 27 nt, synthetic construct
  misc_feature 1..27: note = Description of Artificial Sequence: Syntheticoligonucleotide
  source 1..27: mol_type = other RNA
gttctctataatggtgaatatcttcaa

SEQ ID NO: 210 - RNA, 27 nt, synthetic construct
  misc_feature 1..27: note = Description of Artificial Sequence: Syntheticoligonucleotide
  source 1..27: mol_type = other RNA
tgttctctataatggtgaatatcttca

SEQ ID NO: 211 - RNA, 27 nt, synthetic construct
  misc_feature 1..27: note = Description of Artificial Sequence: Syntheticoligonucleotide
  source 1..27: mol_type = other RNA
ttgttctctataatggtgaatatcttc

SEQ ID NO: 212 - RNA, 27 nt, synthetic construct
  misc_feature 1..27: note = Description of Artificial Sequence: Syntheticoligonucleotide
  source 1..27: mol_type = other RNA
tttgttctctataatggtgaatatctt

SEQ ID NO: 213 - RNA, 27 nt, synthetic construct
  misc_feature 1..27: note = Description of Artificial Sequence: Syntheticoligonucleotide
  source 1..27: mol_type = other RNA
actcttttaatttgttctctataatgg

SEQ ID NO: 214 - RNA, 27 nt, synthetic construct
  misc_feature 1..27: note = Description of Artificial Sequence: Syntheticoligonucleotide
  source 1..27: mol_type = other RNA
taactcttttaatttgttctctataat

SEQ ID NO: 215 - RNA, 27 nt, synthetic construct
  misc_feature 1..27: note = Description of Artificial Sequence: Syntheticoligonucleotide
  source 1..27: mol_type = other RNA
ttaactcttttaatttgttctctataa

SEQ ID NO: 216 - RNA, 27 nt, synthetic construct
  misc_feature 1..27: note = Description of Artificial Sequence: Syntheticoligonucleotide
  source 1..27: mol_type = other RNA
cttaactcttttaatttgttctctata

SEQ ID NO: 217 - RNA, 27 nt, synthetic construct
  misc_feature 1..27: note = Description of Artificial Sequence: Syntheticoligonucleotide
  source 1..27: mol_type = other RNA
ccttaactcttttaatttgttctctat

SEQ ID NO: 218 - RNA, 27 nt, synthetic construct
  misc_feature 1..27: note = Description of Artificial Sequence: Syntheticoligonucleotide
  source 1..27: mol_type = other RNA
aggcaaatcacatttatttcctactag

SEQ ID NO: 219 - RNA, 27 nt, synthetic construct
  misc_feature 1..27: note = Description of Artificial Sequence: Syntheticoligonucleotide
  source 1..27: mol_type = other RNA
aaggcaaatcacatttatttcctacta

SEQ ID NO: 220 - RNA, 27 nt, synthetic construct
  misc_feature 1..27: note = Description of Artificial Sequence: Syntheticoligonucleotide
  source 1..27: mol_type = other RNA
tcaataaaaggaattccataacttctt

SEQ ID NO: 221 - RNA, 27 nt, synthetic construct
  misc_feature 1..27: note = Description of Artificial Sequence: Syntheticoligonucleotide
  source 1..27: mol_type = other RNA
gtttcaataaaaggaattccataactt

SEQ ID NO: 222 - RNA, 27 nt, synthetic construct
  misc_feature 1..27: note = Description of Artificial Sequence: Syntheticoligonucleotide
  source 1..27: mol_type = other RNA
tgtttcaataaaaggaattccataact

SEQ ID NO: 223 - RNA, 27 nt, synthetic construct
  misc_feature 1..27: note = Description of Artificial Sequence: Syntheticoligonucleotide
  source 1..27: mol_type = other RNA
atgtttcaataaaaggaattccataac

SEQ ID NO: 224 - RNA, 27 nt, synthetic construct
  misc_feature 1..27: note = Description of Artificial Sequence: Syntheticoligonucleotide
  source 1..27: mol_type = other RNA
gatgtttcaataaaaggaattccataa

SEQ ID NO: 225 - RNA, 27 nt, synthetic construct
  misc_feature 1..27: note = Description of Artificial Sequence: Syntheticoligonucleotide
  source 1..27: mol_type = other RNA
tcaccaatgtataaaaagcatcctcca

SEQ ID NO: 226 - RNA, 27 nt, synthetic construct
  misc_feature 1..27: note = Description of Artificial Sequence: Syntheticoligonucleotide
  source 1..27: mol_type = other RNA
cctcaccaatgtataaaaagcatcctc

SEQ ID NO: 227 - RNA, 27 nt, synthetic construct
  misc_feature 1..27: note = Description of Artificial Sequence: Syntheticoligonucleotide
  source 1..27: mol_type = other RNA
cttctttgctgatttttttcaatctgt

SEQ ID NO: 228 - RNA, 27 nt, synthetic construct
  misc_feature 1..27: note = Description of Artificial Sequence: Syntheticoligonucleotide
  source 1..27: mol_type = other RNA
tcttctttgctgatttttttcaatctg

SEQ ID NO: 229 - RNA, 27 nt, synthetic construct
  misc_feature 1..27: note = Description of Artificial Sequence: Syntheticoligonucleotide
  source 1..27: mol_type = other RNA
tttcttctttgctgatttttttcaatc

SEQ ID NO: 230 - RNA, 27 nt, synthetic construct
  misc_feature 1..27: note = Description of Artificial Sequence: Syntheticoligonucleotide
  source 1..27: mol_type = other RNA
ttttcttctttgctgatttttttcaat

SEQ ID NO: 231 - RNA, 27 nt, synthetic construct
  misc_feature 1..27: note = Description of Artificial Sequence: Syntheticoligonucleotide
  source 1..27: mol_type = other RNA
cttttcttctttgctgatttttttcaa

SEQ ID NO: 232 - RNA, 27 nt, synthetic construct
  misc_feature 1..27: note = Description of Artificial Sequence: Syntheticoligonucleotide
  source 1..27: mol_type = other RNA
tcttttcttctttgctgatttttttca

SEQ ID NO: 233 - RNA, 27 nt, synthetic construct
  misc_feature 1..27: note = Description of Artificial Sequence: Syntheticoligonucleotide
  source 1..27: mol_type = other RNA
cattttttaattttcacacagccagga

SEQ ID NO: 234 - RNA, 27 nt, synthetic construct
  misc_feature 1..27: note = Description of Artificial Sequence: Syntheticoligonucleotide
  source 1..27: mol_type = other RNA
aatgcattttttaattttcacacagcc

SEQ ID NO: 235 - RNA, 27 nt, synthetic construct
  misc_feature 1..27: note = Description of Artificial Sequence: Syntheticoligonucleotide
  source 1..27: mol_type = other RNA
ttataatgcattttttaattttcacac

SEQ ID NO: 236 - RNA, 27 nt, synthetic construct
  misc_feature 1..27: note = Description of Artificial Sequence: Syntheticoligonucleotide
  source 1..27: mol_type = other RNA
attataatgcattttttaattttcaca

SEQ ID NO: 237 - RNA, 27 nt, synthetic construct
  misc_feature 1..27: note = Description of Artificial Sequence: Syntheticoligonucleotide
  source 1..27: mol_type = other RNA
cattataatgcattttttaattttcac

SEQ ID NO: 238 - RNA, 27 nt, synthetic construct
  misc_feature 1..27: note = Description of Artificial Sequence: Syntheticoligonucleotide
  source 1..27: mol_type = other RNA
acattataatgcattttttaattttca

SEQ ID NO: 239 - RNA, 27 nt, synthetic construct
  misc_feature 1..27: note = Description of Artificial Sequence: Syntheticoligonucleotide
  source 1..27: mol_type = other RNA
ttacattataatgcattttttaatttt

SEQ ID NO: 240 - RNA, 27 nt, synthetic construct
  misc_feature 1..27: note = Description of Artificial Sequence: Syntheticoligonucleotide
  source 1..27: mol_type = other RNA
attacattataatgcattttttaattt

SEQ ID NO: 241 - RNA, 27 nt, synthetic construct
  misc_feature 1..27: note = Description of Artificial Sequence: Syntheticoligonucleotide
  source 1..27: mol_type = other RNA
gattacattataatgcattttttaatt

SEQ ID NO: 242 - RNA, 27 nt, synthetic construct
  misc_feature 1..27: note = Description of Artificial Sequence: Syntheticoligonucleotide
  source 1..27: mol_type = other RNA
agattacattataatgcattttttaat

SEQ ID NO: 243 - RNA, 27 nt, synthetic construct
  misc_feature 1..27: note = Description of Artificial Sequence: Syntheticoligonucleotide
  source 1..27: mol_type = other RNA
ccagattacattataatgcatttttta

SEQ ID NO: 244 - RNA, 27 nt, synthetic construct
  misc_feature 1..27: note = Description of Artificial Sequence: Syntheticoligonucleotide
  source 1..27: mol_type = other RNA
tcaacacccagattacattataatgca

SEQ ID NO: 245 - RNA, 27 nt, synthetic construct
  misc_feature 1..27: note = Description of Artificial Sequence: Syntheticoligonucleotide
  source 1..27: mol_type = other RNA
tttctttatgttttcgaatttctcgaa

SEQ ID NO: 246 - RNA, 27 nt, synthetic construct
  misc_feature 1..27: note = Description of Artificial Sequence: Syntheticoligonucleotide
  source 1..27: mol_type = other RNA
ttttctttatgttttcgaatttctcga

SEQ ID NO: 247 - RNA, 27 nt, synthetic construct
  misc_feature 1..27: note = Description of Artificial Sequence: Syntheticoligonucleotide
  source 1..27: mol_type = other RNA
cttttctttatgttttcgaatttctcg

SEQ ID NO: 248 - RNA, 27 nt, synthetic construct
  misc_feature 1..27: note = Description of Artificial Sequence: Syntheticoligonucleotide
  source 1..27: mol_type = other RNA
catcttttctttatgttttcgaatttc

SEQ ID NO: 249 - RNA, 27 nt, synthetic construct
  misc_feature 1..27: note = Description of Artificial Sequence: Syntheticoligonucleotide
  source 1..27: mol_type = other RNA
ttgctcatcttttctttatgttttcga

SEQ ID NO: 250 - RNA, 27 nt, synthetic construct
  misc_feature 1..27: note = Description of Artificial Sequence: Syntheticoligonucleotide
  source 1..27: mol_type = other RNA
tttgctcatcttttctttatgttttcg

SEQ ID NO: 251 - RNA, 27 nt, synthetic construct
  misc_feature 1..27: note = Description of Artificial Sequence: Syntheticoligonucleotide
  source 1..27: mol_type = other RNA
cttctttttcttctttttaccatcttt

SEQ ID NO: 252 - RNA, 27 nt, synthetic construct
  misc_feature 1..27: note = Description of Artificial Sequence: Syntheticoligonucleotide
  source 1..27: mol_type = other RNA
acttctttttcttctttttaccatctt

SEQ ID NO: 253 - RNA, 27 nt, synthetic construct
  misc_feature 1..27: note = Description of Artificial Sequence: Syntheticoligonucleotide
  source 1..27: mol_type = other RNA
tgacttctttttcttctttttaccatc

SEQ ID NO: 254 - RNA, 27 nt, synthetic construct
  misc_feature 1..27: note = Description of Artificial Sequence: Syntheticoligonucleotide
  source 1..27: mol_type = other RNA
ttgacttctttttcttctttttaccat

SEQ ID NO: 255 - RNA, 27 nt, synthetic construct
  misc_feature 1..27: note = Description of Artificial Sequence: Syntheticoligonucleotide
  source 1..27: mol_type = other RNA
tgtctttgacttctttttcttcttttt

SEQ ID NO: 256 - RNA, 27 nt, synthetic construct
  misc_feature 1..27: note = Description of Artificial Sequence: Syntheticoligonucleotide
  source 1..27: mol_type = other RNA
ttgtctttgacttctttttcttctttt

SEQ ID NO: 257 - RNA, 27 nt, synthetic construct
  misc_feature 1..27: note = Description of Artificial Sequence: Syntheticoligonucleotide
  source 1..27: mol_type = other RNA
tttgtctttgacttctttttcttcttt

SEQ ID NO: 258 - RNA, 27 nt, synthetic construct
  misc_feature 1..27: note = Description of Artificial Sequence: Syntheticoligonucleotide
  source 1..27: mol_type = other RNA
ttacataattacacactttgtctttga

SEQ ID NO: 259 - RNA, 27 nt, synthetic construct
  misc_feature 1..27: note = Description of Artificial Sequence: Syntheticoligonucleotide
  source 1..27: mol_type = other RNA
tttacataattacacactttgtctttg

SEQ ID NO: 260 - RNA, 27 nt, synthetic construct
  misc_feature 1..27: note = Description of Artificial Sequence: Syntheticoligonucleotide
  source 1..27: mol_type = other RNA
tgtatttacataattacacactttgtc

SEQ ID NO: 261 - RNA, 27 nt, synthetic construct
  misc_feature 1..27: note = Description of Artificial Sequence: Syntheticoligonucleotide
  source 1..27: mol_type = other RNA
attgtatttacataattacacactttg

SEQ ID NO: 262 - RNA, 27 nt, synthetic construct
  misc_feature 1..27: note = Description of Artificial Sequence: Syntheticoligonucleotide
  source 1..27: mol_type = other RNA
acaaattgtatttacataattacacac

SEQ ID NO: 263 - RNA, 27 nt, synthetic construct
  misc_feature 1..27: note = Description of Artificial Sequence: Syntheticoligonucleotide
  source 1..27: mol_type = other RNA
gtacaaattgtatttacataattacac

SEQ ID NO: 264 - RNA, 27 nt, synthetic construct
  misc_feature 1..27: note = Description of Artificial Sequence: Syntheticoligonucleotide
  source 1..27: mol_type = other RNA
aagtacaaattgtatttacataattac

SEQ ID NO: 265 - RNA, 27 nt, synthetic construct
  misc_feature 1..27: note = Description of Artificial Sequence: Syntheticoligonucleotide
  source 1..27: mol_type = other RNA
aaagtacaaattgtatttacataatta

SEQ ID NO: 266 - RNA, 27 nt, synthetic construct
  misc_feature 1..27: note = Description of Artificial Sequence: Syntheticoligonucleotide
  source 1..27: mol_type = other RNA
gaaaaaagtacaaattgtatttacata

SEQ ID NO: 267 - RNA, 27 nt, synthetic construct
  misc_feature 1..27: note = Description of Artificial Sequence: Syntheticoligonucleotide
  source 1..27: mol_type = other RNA
agaaaaaagtacaaattgtatttacat

SEQ ID NO: 268 - RNA, 27 nt, synthetic construct
  misc_feature 1..27: note = Description of Artificial Sequence: Syntheticoligonucleotide
  source 1..27: mol_type = other RNA
aagaaaaaagtacaaattgtatttaca

SEQ ID NO: 269 - RNA, 27 nt, synthetic construct
  misc_feature 1..27: note = Description of Artificial Sequence: Syntheticoligonucleotide
  source 1..27: mol_type = other RNA
taagaaaaaagtacaaattgtatttac

SEQ ID NO: 270 - RNA, 27 nt, synthetic construct
  misc_feature 1..27: note = Description of Artificial Sequence: Syntheticoligonucleotide
  source 1..27: mol_type = other RNA
atgccttaagaaaaaagtacaaattgt

SEQ ID NO: 271 - RNA, 27 nt, synthetic construct
  misc_feature 1..27: note = Description of Artificial Sequence: Syntheticoligonucleotide
  source 1..27: mol_type = other RNA
tatgccttaagaaaaaagtacaaattg

SEQ ID NO: 272 - RNA, 27 nt, synthetic construct
  misc_feature 1..27: note = Description of Artificial Sequence: Syntheticoligonucleotide
  source 1..27: mol_type = other RNA
gtacaaaaattaccacttgtactagta

SEQ ID NO: 273 - RNA, 27 nt, synthetic construct
  misc_feature 1..27: note = Description of Artificial Sequence: Syntheticoligonucleotide
  source 1..27: mol_type = other RNA
tgtacaaaaattaccacttgtactagt

SEQ ID NO: 274 - RNA, 27 nt, synthetic construct
  misc_feature 1..27: note = Description of Artificial Sequence: Syntheticoligonucleotide
  source 1..27: mol_type = other RNA
gtgtaatgtacaaaaattaccacttgt

SEQ ID NO: 275 - RNA, 27 nt, synthetic construct
  misc_feature 1..27: note = Description of Artificial Sequence: Syntheticoligonucleotide
  source 1..27: mol_type = other RNA
agtgtaatgtacaaaaattaccacttg

SEQ ID NO: 276 - RNA, 27 nt, synthetic construct
  misc_feature 1..27: note = Description of Artificial Sequence: Syntheticoligonucleotide
  source 1..27: mol_type = other RNA
ataatttagtgtaatgtacaaaaatta

SEQ ID NO: 277 - RNA, 27 nt, synthetic construct
  misc_feature 1..27: note = Description of Artificial Sequence: Syntheticoligonucleotide
  source 1..27: mol_type = other RNA
aataatttagtgtaatgtacaaaaatt

SEQ ID NO: 278 - RNA, 27 nt, synthetic construct
  misc_feature 1..27: note = Description of Artificial Sequence: Syntheticoligonucleotide
  source 1..27: mol_type = other RNA
taataatttagtgtaatgtacaaaaat

SEQ ID NO: 279 - RNA, 27 nt, synthetic construct
  misc_feature 1..27: note = Description of Artificial Sequence: Syntheticoligonucleotide
  source 1..27: mol_type = other RNA
ctaataatttagtgtaatgtacaaaaa

SEQ ID NO: 280 - RNA, 27 nt, synthetic construct
  misc_feature 1..27: note = Description of Artificial Sequence: Syntheticoligonucleotide
  source 1..27: mol_type = other RNA
gctaataatttagtgtaatgtacaaaa

SEQ ID NO: 281 - RNA, 27 nt, synthetic construct
  misc_feature 1..27: note = Description of Artificial Sequence: Syntheticoligonucleotide
  source 1..27: mol_type = other RNA
gctaaaacaaatgctaataatttagtg

SEQ ID NO: 282 - RNA, 27 nt, synthetic construct
  misc_feature 1..27: note = Description of Artificial Sequence: Syntheticoligonucleotide
  source 1..27: mol_type = other RNA
atgctaaaacaaatgctaataatttag

SEQ ID NO: 283 - RNA, 27 nt, synthetic construct
  misc_feature 1..27: note = Description of Artificial Sequence: Syntheticoligonucleotide
  source 1..27: mol_type = other RNA
aatgctaaaacaaatgctaataattta

SEQ ID NO: 284 - RNA, 27 nt, synthetic construct
  misc_feature 1..27: note = Description of Artificial Sequence: Syntheticoligonucleotide
  source 1..27: mol_type = other RNA
taggtaatgctaaaacaaatgctaata

SEQ ID NO: 285 - RNA, 27 nt, synthetic construct
  misc_feature 1..27: note = Description of Artificial Sequence: Syntheticoligonucleotide
  source 1..27: mol_type = other RNA
aaaaattaggtaatgctaaaacaaatg

SEQ ID NO: 286 - RNA, 27 nt, synthetic construct
  misc_feature 1..27: note = Description of Artificial Sequence: Syntheticoligonucleotide
  source 1..27: mol_type = other RNA
aaaaaattaggtaatgctaaaacaaat

SEQ ID NO: 287 - RNA, 27 nt, synthetic construct
  misc_feature 1..27: note = Description of Artificial Sequence: Syntheticoligonucleotide
  source 1..27: mol_type = other RNA
gaaaaaaattaggtaatgctaaaacaa

SEQ ID NO: 288 - RNA, 27 nt, synthetic construct
  misc_feature 1..27: note = Description of Artificial Sequence: Syntheticoligonucleotide
  source 1..27: mol_type = other RNA
ggaaaaaaattaggtaatgctaaaaca

SEQ ID NO: 289 - RNA, 27 nt, synthetic construct
  misc_feature 1..27: note = Description of Artificial Sequence: Syntheticoligonucleotide
  source 1..27: mol_type = other RNA
aggaaaaaaattaggtaatgctaaaac

SEQ ID NO: 290 - RNA, 27 nt, synthetic construct
  misc_feature 1..27: note = Description of Artificial Sequence: Syntheticoligonucleotide
  source 1..27: mol_type = other RNA
caggaaaaaaattaggtaatgctaaaa

SEQ ID NO: 291 - RNA, 27 nt, synthetic construct
  misc_feature 1..27: note = Description of Artificial Sequence: Syntheticoligonucleotide
  source 1..27: mol_type = other RNA
aagcatttaaggtaaaagctaacagtc

SEQ ID NO: 292 - RNA, 27 nt, synthetic construct
  misc_feature 1..27: note = Description of Artificial Sequence: Syntheticoligonucleotide
  source 1..27: mol_type = other RNA
taagcatttaaggtaaaagctaacagt

SEQ ID NO: 293 - RNA, 27 nt, synthetic construct
  misc_feature 1..27: note = Description of Artificial Sequence: Syntheticoligonucleotide
  source 1..27: mol_type = other RNA
ttaaaataagcatttaaggtaaaagct

SEQ ID NO: 294 - RNA, 27 nt, synthetic construct
  misc_feature 1..27: note = Description of Artificial Sequence: Syntheticoligonucleotide
  source 1..27: mol_type = other RNA
tttaaaataagcatttaaggtaaaagc

SEQ ID NO: 295 - RNA, 27 nt, synthetic construct
  misc_feature 1..27: note = Description of Artificial Sequence: Syntheticoligonucleotide
  source 1..27: mol_type = other RNA
ttttaaaataagcatttaaggtaaaag

SEQ ID NO: 296 - RNA, 27 nt, synthetic construct
  misc_feature 1..27: note = Description of Artificial Sequence: Syntheticoligonucleotide
  source 1..27: mol_type = other RNA
ctgtcattttaaaataagcatttaagg

SEQ ID NO: 297 - RNA, 27 nt, synthetic construct
  misc_feature 1..27: note = Description of Artificial Sequence: Syntheticoligonucleotide
  source 1..27: mol_type = other RNA
actgtcattttaaaataagcatttaag

SEQ ID NO: 298 - RNA, 27 nt, synthetic construct
  misc_feature 1..27: note = Description of Artificial Sequence: Syntheticoligonucleotide
  source 1..27: mol_type = other RNA
acttccactgtcattttaaaataagca

SEQ ID NO: 299 - RNA, 27 nt, synthetic construct
  misc_feature 1..27: note = Description of Artificial Sequence: Syntheticoligonucleotide
  source 1..27: mol_type = other RNA
aaacttccactgtcattttaaaataag

SEQ ID NO: 300 - RNA, 27 nt, synthetic construct
  misc_feature 1..27: note = Description of Artificial Sequence: Syntheticoligonucleotide
  source 1..27: mol_type = other RNA
gcacttagaggaaaaaaaaacttccac

SEQ ID NO: 301 - RNA, 27 nt, synthetic construct
  misc_feature 1..27: note = Description of Artificial Sequence: Syntheticoligonucleotide
  source 1..27: mol_type = other RNA
tggcacttagaggaaaaaaaaacttcc

SEQ ID NO: 302 - RNA, 27 nt, synthetic construct
  misc_feature 1..27: note = Description of Artificial Sequence: Syntheticoligonucleotide
  source 1..27: mol_type = other RNA
ctggcacttagaggaaaaaaaaacttc

SEQ ID NO: 303 - RNA, 27 nt, synthetic construct
  misc_feature 1..27: note = Description of Artificial Sequence: Syntheticoligonucleotide
  source 1..27: mol_type = other RNA
caggcattgctagttcaaaaaccaaaa

SEQ ID NO: 304 - RNA, 27 nt, synthetic construct
  misc_feature 1..27: note = Description of Artificial Sequence: Syntheticoligonucleotide
  source 1..27: mol_type = other RNA
taggtattcagtttctttttcacaggc

SEQ ID NO: 305 - RNA, 27 nt, synthetic construct
  misc_feature 1..27: note = Description of Artificial Sequence: Syntheticoligonucleotide
  source 1..27: mol_type = other RNA
gaaatcttaggtattcagtttcttttt

SEQ ID NO: 306 - RNA, 27 nt, synthetic construct
  misc_feature 1..27: note = Description of Artificial Sequence: Syntheticoligonucleotide
  source 1..27: mol_type = other RNA
agaaatcttaggtattcagtttctttt

SEQ ID NO: 307 - RNA, 27 nt, synthetic construct
  misc_feature 1..27: note = Description of Artificial Sequence: Syntheticoligonucleotide
  source 1..27: mol_type = other RNA
caagacagaaatcttaggtattcagtt

SEQ ID NO: 308 - RNA, 27 nt, synthetic construct
  misc_feature 1..27: note = Description of Artificial Sequence: Syntheticoligonucleotide
  source 1..27: mol_type = other RNA
aagaaaaataagaagtaatcaactgca

SEQ ID NO: 309 - RNA, 27 nt, synthetic construct
  misc_feature 1..27: note = Description of Artificial Sequence: Syntheticoligonucleotide
  source 1..27: mol_type = other RNA
taagaaaaataagaagtaatcaactgc

SEQ ID NO: 310 - RNA, 27 nt, synthetic construct
  misc_feature 1..27: note = Description of Artificial Sequence: Syntheticoligonucleotide
  source 1..27: mol_type = other RNA
ttggtaagaaaaataagaagtaatcaa

SEQ ID NO: 311 - RNA, 27 nt, synthetic construct
  misc_feature 1..27: note = Description of Artificial Sequence: Syntheticoligonucleotide
  source 1..27: mol_type = other RNA
attcacaattggtaagaaaaataagaa

SEQ ID NO: 312 - RNA, 27 nt, synthetic construct
  misc_feature 1..27: note = Description of Artificial Sequence: Syntheticoligonucleotide
  source 1..27: mol_type = other RNA
cattcacaattggtaagaaaaataaga

SEQ ID NO: 313 - RNA, 27 nt, synthetic construct
  misc_feature 1..27: note = Description of Artificial Sequence: Syntheticoligonucleotide
  source 1..27: mol_type = other RNA
acattcacaattggtaagaaaaataag

SEQ ID NO: 314 - RNA, 27 nt, synthetic construct
  misc_feature 1..27: note = Description of Artificial Sequence: Syntheticoligonucleotide
  source 1..27: mol_type = other RNA
cttcattaatttgtttcacaccaacat

SEQ ID NO: 315 - RNA, 27 nt, synthetic construct
  misc_feature 1..27: note = Description of Artificial Sequence: Syntheticoligonucleotide
  source 1..27: mol_type = other RNA
aagcttcattaatttgtttcacaccaa

SEQ ID NO: 316 - RNA, 27 nt, synthetic construct
  misc_feature 1..27: note = Description of Artificial Sequence: Syntheticoligonucleotide
  source 1..27: mol_type = other RNA
aaagcttcattaatttgtttcacacca

SEQ ID NO: 317 - RNA, 27 nt, synthetic construct
  misc_feature 1..27: note = Description of Artificial Sequence: Syntheticoligonucleotide
  source 1..27: mol_type = other RNA
atgattcaaaagcttcattaatttgtt

SEQ ID NO: 318 - RNA, 27 nt, synthetic construct
  misc_feature 1..27: note = Description of Artificial Sequence: Syntheticoligonucleotide
  source 1..27: mol_type = other RNA
gatgattcaaaagcttcattaatttgt

SEQ ID NO: 319 - RNA, 27 nt, synthetic construct
  misc_feature 1..27: note = Description of Artificial Sequence: Syntheticoligonucleotide
  source 1..27: mol_type = other RNA
catttatgtgactagataaaacacaga

SEQ ID NO: 320 - RNA, 27 nt, synthetic construct
  misc_feature 1..27: note = Description of Artificial Sequence: Syntheticoligonucleotide
  source 1..27: mol_type = other RNA
ccatttatgtgactagataaaacacag

SEQ ID NO: 321 - RNA, 27 nt, synthetic construct
  misc_feature 1..27: note = Description of Artificial Sequence: Syntheticoligonucleotide
  source 1..27: mol_type = other RNA
aatccatttatgtgactagataaaaca

SEQ ID NO: 322 - RNA, 27 nt, synthetic construct
  misc_feature 1..27: note = Description of Artificial Sequence: Syntheticoligonucleotide
  source 1..27: mol_type = other RNA
taatccatttatgtgactagataaaac

SEQ ID NO: 323 - RNA, 27 nt, synthetic construct
  misc_feature 1..27: note = Description of Artificial Sequence: Syntheticoligonucleotide
  source 1..27: mol_type = other RNA
gtaattaatccatttatgtgactagat

SEQ ID NO: 324 - RNA, 27 nt, synthetic construct
  misc_feature 1..27: note = Description of Artificial Sequence: Syntheticoligonucleotide
  source 1..27: mol_type = other RNA
agtaattaatccatttatgtgactaga

SEQ ID NO: 325 - RNA, 27 nt, synthetic construct
  misc_feature 1..27: note = Description of Artificial Sequence: Syntheticoligonucleotide
  source 1..27: mol_type = other RNA
ctgaaattagtaattaatccatttatg

SEQ ID NO: 326 - RNA, 27 nt, synthetic construct
  misc_feature 1..27: note = Description of Artificial Sequence: Syntheticoligonucleotide
  source 1..27: mol_type = other RNA
actgaaattagtaattaatccatttat

SEQ ID NO: 327 - RNA, 27 nt, synthetic construct
  misc_feature 1..27: note = Description of Artificial Sequence: Syntheticoligonucleotide
  source 1..27: mol_type = other RNA
tctcaactgaaattagtaattaatcca

SEQ ID NO: 328 - RNA, 27 nt, synthetic construct
  misc_feature 1..27: note = Description of Artificial Sequence: Syntheticoligonucleotide
  source 1..27: mol_type = other RNA
ggtctcaactgaaattagtaattaatc

SEQ ID NO: 329 - RNA, 27 nt, synthetic construct
  misc_feature 1..27: note = Description of Artificial Sequence: Syntheticoligonucleotide
  source 1..27: mol_type = other RNA
aggtctcaactgaaattagtaattaat

SEQ ID NO: 330 - RNA, 27 nt, synthetic construct
  misc_feature 1..27: note = Description of Artificial Sequence: Syntheticoligonucleotide
  source 1..27: mol_type = other RNA
aaggtctcaactgaaattagtaattaa

SEQ ID NO: 331 - RNA, 27 nt, synthetic construct
  misc_feature 1..27: note = Description of Artificial Sequence: Syntheticoligonucleotide
  source 1..27: mol_type = other RNA
cctcaatgtttcagtaaaaaccaatta

SEQ ID NO: 332 - RNA, 27 nt, synthetic construct
  misc_feature 1..27: note = Description of Artificial Sequence: Syntheticoligonucleotide
  source 1..27: mol_type = other RNA
gttccctcaatgtttcagtaaaaacca

SEQ ID NO: 333 - RNA, 27 nt, synthetic construct
  misc_feature 1..27: note = Description of Artificial Sequence: Syntheticoligonucleotide
  source 1..27: mol_type = other RNA
tgttccctcaatgtttcagtaaaaacc

SEQ ID NO: 334 - RNA, 27 nt, synthetic construct
  misc_feature 1..27: note = Description of Artificial Sequence: Syntheticoligonucleotide
  source 1..27: mol_type = other RNA
aagcccataaatttgtgttccctcaat

SEQ ID NO: 335 - RNA, 27 nt, synthetic construct
  misc_feature 1..27: note = Description of Artificial Sequence: Syntheticoligonucleotide
  source 1..27: mol_type = other RNA
gaagcccataaatttgtgttccctcaa

SEQ ID NO: 336 - RNA, 27 nt, synthetic construct
  misc_feature 1..27: note = Description of Artificial Sequence: Syntheticoligonucleotide
  source 1..27: mol_type = other RNA
gtgaacagtgtaactttacattcatca

SEQ ID NO: 337 - RNA, 27 nt, synthetic construct
  misc_feature 1..27: note = Description of Artificial Sequence: Syntheticoligonucleotide
  source 1..27: mol_type = other RNA
tgtgaacagtgtaactttacattcatc

SEQ ID NO: 338 - RNA, 27 nt, synthetic construct
  misc_feature 1..27: note = Description of Artificial Sequence: Syntheticoligonucleotide
  source 1..27: mol_type = other RNA
ttttatagaaaaaatataatattttgg

SEQ ID NO: 339 - RNA, 27 nt, synthetic construct
  misc_feature 1..27: note = Description of Artificial Sequence: Syntheticoligonucleotide
  source 1..27: mol_type = other RNA
tttttatagaaaaaatataatattttg

SEQ ID NO: 340 - RNA, 27 nt, synthetic construct
  misc_feature 1..27: note = Description of Artificial Sequence: Syntheticoligonucleotide
  source 1..27: mol_type = other RNA
ctttttatagaaaaaatataatatttt

SEQ ID NO: 341 - RNA, 27 nt, synthetic construct
  misc_feature 1..27: note = Description of Artificial Sequence: Syntheticoligonucleotide
  source 1..27: mol_type = other RNA
tctttttatagaaaaaatataatattt

SEQ ID NO: 342 - RNA, 27 nt, synthetic construct
  misc_feature 1..27: note = Description of Artificial Sequence: Syntheticoligonucleotide
  source 1..27: mol_type = other RNA
tttctttttatagaaaaaatataatat

SEQ ID NO: 343 - RNA, 27 nt, synthetic construct
  misc_feature 1..27: note = Description of Artificial Sequence: Syntheticoligonucleotide
  source 1..27: mol_type = other RNA
ttttctttttatagaaaaaatataata

SEQ ID NO: 344 - RNA, 27 nt, synthetic construct
  misc_feature 1..27: note = Description of Artificial Sequence: Syntheticoligonucleotide
  source 1..27: mol_type = other RNA
tttttctttttatagaaaaaatataat

SEQ ID NO: 345 - RNA, 27 nt, synthetic construct
  misc_feature 1..27: note = Description of Artificial Sequence: Syntheticoligonucleotide
  source 1..27: mol_type = other RNA
ttttttctttttatagaaaaaatataa

SEQ ID NO: 346 - RNA, 27 nt, synthetic construct
  misc_feature 1..27: note = Description of Artificial Sequence: Syntheticoligonucleotide
  source 1..27: mol_type = other RNA
tttttttctttttatagaaaaaatata

SEQ ID NO: 347 - RNA, 27 nt, synthetic construct
  misc_feature 1..27: note = Description of Artificial Sequence: Syntheticoligonucleotide
  source 1..27: mol_type = other RNA
atttttttctttttatagaaaaaatat

SEQ ID NO: 348 - RNA, 27 nt, synthetic construct
  misc_feature 1..27: note = Description of Artificial Sequence: Syntheticoligonucleotide
  source 1..27: mol_type = other RNA
catttttttctttttatagaaaaaata

SEQ ID NO: 349 - RNA, 27 nt, synthetic construct
  misc_feature 1..27: note = Description of Artificial Sequence: Syntheticoligonucleotide
  source 1..27: mol_type = other RNA
ccatttttttctttttatagaaaaaat

SEQ ID NO: 350 - RNA, 27 nt, synthetic construct
  misc_feature 1..27: note = Description of Artificial Sequence: Syntheticoligonucleotide
  source 1..27: mol_type = other RNA
tttttccatttttttctttttatagaa

SEQ ID NO: 351 - RNA, 27 nt, synthetic construct
  misc_feature 1..27: note = Description of Artificial Sequence: Syntheticoligonucleotide
  source 1..27: mol_type = other RNA
ttttttccatttttttctttttataga

SEQ ID NO: 352 - RNA, 27 nt, synthetic construct
  misc_feature 1..27: note = Description of Artificial Sequence: Syntheticoligonucleotide
  source 1..27: mol_type = other RNA
atttttttccatttttttctttttata

SEQ ID NO: 353 - RNA, 27 nt, synthetic construct
  misc_feature 1..27: note = Description of Artificial Sequence: Syntheticoligonucleotide
  source 1..27: mol_type = other RNA
aatttttttccatttttttctttttat

SEQ ID NO: 354 - RNA, 27 nt, synthetic construct
  misc_feature 1..27: note = Description of Artificial Sequence: Syntheticoligonucleotide
  source 1..27: mol_type = other RNA
taatttttttccatttttttcttttta

SEQ ID NO: 355 - RNA, 27 nt, synthetic construct
  misc_feature 1..27: note = Description of Artificial Sequence: Syntheticoligonucleotide
  source 1..27: mol_type = other RNA
gtaatttttttccatttttttcttttt

SEQ ID NO: 356 - RNA, 27 nt, synthetic construct
  misc_feature 1..27: note = Description of Artificial Sequence: Syntheticoligonucleotide
  source 1..27: mol_type = other RNA
tgtaatttttttccatttttttctttt

SEQ ID NO: 357 - RNA, 27 nt, synthetic construct
  misc_feature 1..27: note = Description of Artificial Sequence: Syntheticoligonucleotide
  source 1..27: mol_type = other RNA
ttgtaatttttttccatttttttcttt

SEQ ID NO: 358 - RNA, 27 nt, synthetic construct
  misc_feature 1..27: note = Description of Artificial Sequence: Syntheticoligonucleotide
  source 1..27: mol_type = other RNA
cttgtaatttttttccatttttttctt

SEQ ID NO: 359 - RNA, 27 nt, synthetic construct
  misc_feature 1..27: note = Description of Artificial Sequence: Syntheticoligonucleotide
  source 1..27: mol_type = other RNA
ttgccttgtaatttttttccatttttt

SEQ ID NO: 360 - RNA, 27 nt, synthetic construct
  misc_feature 1..27: note = Description of Artificial Sequence: Syntheticoligonucleotide
  source 1..27: mol_type = other RNA
attgccttgtaatttttttccattttt

SEQ ID NO: 361 - RNA, 27 nt, synthetic construct
  misc_feature 1..27: note = Description of Artificial Sequence: Syntheticoligonucleotide
  source 1..27: mol_type = other RNA
tttccattgccttgtaatttttttcca

SEQ ID NO: 362 - RNA, 27 nt, synthetic construct
  misc_feature 1..27: note = Description of Artificial Sequence: Syntheticoligonucleotide
  source 1..27: mol_type = other RNA
gtttccattgccttgtaatttttttcc

SEQ ID NO: 363 - RNA, 27 nt, synthetic construct
  misc_feature 1..27: note = Description of Artificial Sequence: Syntheticoligonucleotide
  source 1..27: mol_type = other RNA
agtttccattgccttgtaatttttttc

SEQ ID NO: 364 - RNA, 27 nt, synthetic construct
  misc_feature 1..27: note = Description of Artificial Sequence: Syntheticoligonucleotide
  source 1..27: mol_type = other RNA
atttatctaatgtgaaaaggaaatggc

SEQ ID NO: 365 - RNA, 27 nt, synthetic construct
  misc_feature 1..27: note = Description of Artificial Sequence: Syntheticoligonucleotide
  source 1..27: mol_type = other RNA
atagtaatttatctaatgtgaaaagga

SEQ ID NO: 366 - RNA, 27 nt, synthetic construct
  misc_feature 1..27: note = Description of Artificial Sequence: Syntheticoligonucleotide
  source 1..27: mol_type = other RNA
agtctttatagtaatttatctaatgtg

SEQ ID NO: 367 - RNA, 27 nt, synthetic construct
  misc_feature 1..27: note = Description of Artificial Sequence: Syntheticoligonucleotide
  source 1..27: mol_type = other RNA
gagtctttatagtaatttatctaatgt

SEQ ID NO: 368 - RNA, 27 nt, synthetic construct
  misc_feature 1..27: note = Description of Artificial Sequence: Syntheticoligonucleotide
  source 1..27: mol_type = other RNA
ggagtctttatagtaatttatctaatg

SEQ ID NO: 369 - RNA, 27 nt, synthetic construct
  misc_feature 1..27: note = Description of Artificial Sequence: Syntheticoligonucleotide
  source 1..27: mol_type = other RNA
ttgctataataatccccatttcatact

SEQ ID NO: 370 - RNA, 27 nt, synthetic construct
  misc_feature 1..27: note = Description of Artificial Sequence: Syntheticoligonucleotide
  source 1..27: mol_type = other RNA
ccaaaatggttgctataataatcccca

SEQ ID NO: 371 - RNA, 27 nt, synthetic construct
  misc_feature 1..27: note = Description of Artificial Sequence: Syntheticoligonucleotide
  source 1..27: mol_type = other RNA
aaaatttagtagcatgtaaatatagcc

SEQ ID NO: 372 - RNA, 27 nt, synthetic construct
  misc_feature 1..27: note = Description of Artificial Sequence: Syntheticoligonucleotide
  source 1..27: mol_type = other RNA
aaaaatttagtagcatgtaaatatagc

SEQ ID NO: 373 - RNA, 27 nt, synthetic construct
  misc_feature 1..27: note = Description of Artificial Sequence: Syntheticoligonucleotide
  source 1..27: mol_type = other RNA
taaaaatttagtagcatgtaaatatag

SEQ ID NO: 374 - RNA, 27 nt, synthetic construct
  misc_feature 1..27: note = Description of Artificial Sequence: Syntheticoligonucleotide
  source 1..27: mol_type = other RNA
ataaaaatttagtagcatgtaaatata

SEQ ID NO: 375 - RNA, 27 nt, synthetic construct
  misc_feature 1..27: note = Description of Artificial Sequence: Syntheticoligonucleotide
  source 1..27: mol_type = other RNA
tataaaaatttagtagcatgtaaatat

SEQ ID NO: 376 - RNA, 27 nt, synthetic construct
  misc_feature 1..27: note = Description of Artificial Sequence: Syntheticoligonucleotide
  source 1..27: mol_type = other RNA
attattataaaaatttagtagcatgta

SEQ ID NO: 377 - RNA, 27 nt, synthetic construct
  misc_feature 1..27: note = Description of Artificial Sequence: Syntheticoligonucleotide
  source 1..27: mol_type = other RNA
cttttcaattattataaaaatttagta

SEQ ID NO: 378 - RNA, 27 nt, synthetic construct
  misc_feature 1..27: note = Description of Artificial Sequence: Syntheticoligonucleotide
  source 1..27: mol_type = other RNA
tcttttcaattattataaaaatttagt

SEQ ID NO: 379 - RNA, 27 nt, synthetic construct
  misc_feature 1..27: note = Description of Artificial Sequence: Syntheticoligonucleotide
  source 1..27: mol_type = other RNA
aatcttttcaattattataaaaattta

SEQ ID NO: 380 - RNA, 27 nt, synthetic construct
  misc_feature 1..27: note = Description of Artificial Sequence: Syntheticoligonucleotide
  source 1..27: mol_type = other RNA
aaatcttttcaattattataaaaattt

SEQ ID NO: 381 - RNA, 27 nt, synthetic construct
  misc_feature 1..27: note = Description of Artificial Sequence: Syntheticoligonucleotide
  source 1..27: mol_type = other RNA
aaaatcttttcaattattataaaaatt

SEQ ID NO: 382 - RNA, 27 nt, synthetic construct
  misc_feature 1..27: note = Description of Artificial Sequence: Syntheticoligonucleotide
  source 1..27: mol_type = other RNA
taaaatcttttcaattattataaaaat

SEQ ID NO: 383 - RNA, 27 nt, synthetic construct
  misc_feature 1..27: note = Description of Artificial Sequence: Syntheticoligonucleotide
  source 1..27: mol_type = other RNA
ttaaaatcttttcaattattataaaaa

SEQ ID NO: 384 - RNA, 27 nt, synthetic construct
  misc_feature 1..27: note = Description of Artificial Sequence: Syntheticoligonucleotide
  source 1..27: mol_type = other RNA
gttaaaatcttttcaattattataaaa

SEQ ID NO: 385 - RNA, 27 nt, synthetic construct
  misc_feature 1..27: note = Description of Artificial Sequence: Syntheticoligonucleotide
  source 1..27: mol_type = other RNA
tgttaaaatcttttcaattattataaa

SEQ ID NO: 386 - RNA, 27 nt, synthetic construct
  misc_feature 1..27: note = Description of Artificial Sequence: Syntheticoligonucleotide
  source 1..27: mol_type = other RNA
ttgttaaaatcttttcaattattataa

SEQ ID NO: 387 - RNA, 27 nt, synthetic construct
  misc_feature 1..27: note = Description of Artificial Sequence: Syntheticoligonucleotide
  source 1..27: mol_type = other RNA
cttgttaaaatcttttcaattattata

SEQ ID NO: 388 - RNA, 27 nt, synthetic construct
  misc_feature 1..27: note = Description of Artificial Sequence: Syntheticoligonucleotide
  source 1..27: mol_type = other RNA
tatacttgttaaaatcttttcaattat

SEQ ID NO: 389 - RNA, 27 nt, synthetic construct
  misc_feature 1..27: note = Description of Artificial Sequence: Syntheticoligonucleotide
  source 1..27: mol_type = other RNA
ttatacttgttaaaatcttttcaatta

SEQ ID NO: 390 - RNA, 27 nt, synthetic construct
  misc_feature 1..27: note = Description of Artificial Sequence: Syntheticoligonucleotide
  source 1..27: mol_type = other RNA
ttttatacttgttaaaatcttttcaat

SEQ ID NO: 391 - RNA, 27 nt, synthetic construct
  misc_feature 1..27: note = Description of Artificial Sequence: Syntheticoligonucleotide
  source 1..27: mol_type = other RNA
tttttatacttgttaaaatcttttcaa

SEQ ID NO: 392 - RNA, 27 nt, synthetic construct
  misc_feature 1..27: note = Description of Artificial Sequence: Syntheticoligonucleotide
  source 1..27: mol_type = other RNA
ttttttatacttgttaaaatcttttca

SEQ ID NO: 393 - RNA, 27 nt, synthetic construct
  misc_feature 1..27: note = Description of Artificial Sequence: Syntheticoligonucleotide
  source 1..27: mol_type = other RNA
attttttatacttgttaaaatcttttc

SEQ ID NO: 394 - RNA, 27 nt, synthetic construct
  misc_feature 1..27: note = Description of Artificial Sequence: Syntheticoligonucleotide
  source 1..27: mol_type = other RNA
aattttttatacttgttaaaatctttt

SEQ ID NO: 395 - RNA, 27 nt, synthetic construct
  misc_feature 1..27: note = Description of Artificial Sequence: Syntheticoligonucleotide
  source 1..27: mol_type = other RNA
gaattttttatacttgttaaaatcttt

SEQ ID NO: 396 - RNA, 27 nt, synthetic construct
  misc_feature 1..27: note = Description of Artificial Sequence: Syntheticoligonucleotide
  source 1..27: mol_type = other RNA
agaattttttatacttgttaaaatctt

SEQ ID NO: 397 - RNA, 27 nt, synthetic construct
  misc_feature 1..27: note = Description of Artificial Sequence: Syntheticoligonucleotide
  source 1..27: mol_type = other RNA
gagaattttttatacttgttaaaatct

SEQ ID NO: 398 - RNA, 27 nt, synthetic construct
  misc_feature 1..27: note = Description of Artificial Sequence: Syntheticoligonucleotide
  source 1..27: mol_type = other RNA
tgagaattttttatacttgttaaaatc

SEQ ID NO: 399 - RNA, 27 nt, synthetic construct
  misc_feature 1..27: note = Description of Artificial Sequence: Syntheticoligonucleotide
  source 1..27: mol_type = other RNA
attcctatgagaattttttatacttgt

SEQ ID NO: 400 - RNA, 27 nt, synthetic construct
  misc_feature 1..27: note = Description of Artificial Sequence: Syntheticoligonucleotide
  source 1..27: mol_type = other RNA
aattcctatgagaattttttatacttg

SEQ ID NO: 401 - RNA, 27 nt, synthetic construct
  misc_feature 1..27: note = Description of Artificial Sequence: Syntheticoligonucleotide
  source 1..27: mol_type = other RNA
taattcctatgagaattttttatactt

SEQ ID NO: 402 - RNA, 27 nt, synthetic construct
  misc_feature 1..27: note = Description of Artificial Sequence: Syntheticoligonucleotide
  source 1..27: mol_type = other RNA
ttaattcctatgagaattttttatact

SEQ ID NO: 403 - RNA, 27 nt, synthetic construct
  misc_feature 1..27: note = Description of Artificial Sequence: Syntheticoligonucleotide
  source 1..27: mol_type = other RNA
tttaattcctatgagaattttttatac

SEQ ID NO: 404 - RNA, 27 nt, synthetic construct
  misc_feature 1..27: note = Description of Artificial Sequence: Syntheticoligonucleotide
  source 1..27: mol_type = other RNA
atttaattcctatgagaattttttata

SEQ ID NO: 405 - RNA, 27 nt, synthetic construct
  misc_feature 1..27: note = Description of Artificial Sequence: Syntheticoligonucleotide
  source 1..27: mol_type = other RNA
catttaattcctatgagaattttttat

SEQ ID NO: 406 - RNA, 27 nt, synthetic construct
  misc_feature 1..27: note = Description of Artificial Sequence: Syntheticoligonucleotide
  source 1..27: mol_type = other RNA
acatttaattcctatgagaatttttta

SEQ ID NO: 407 - RNA, 27 nt, synthetic construct
  misc_feature 1..27: note = Description of Artificial Sequence: Syntheticoligonucleotide
  source 1..27: mol_type = other RNA
ctacatttaattcctatgagaattttt

SEQ ID NO: 408 - RNA, 27 nt, synthetic construct
  misc_feature 1..27: note = Description of Artificial Sequence: Syntheticoligonucleotide
  source 1..27: mol_type = other RNA
actacatttaattcctatgagaatttt

SEQ ID NO: 409 - RNA, 27 nt, synthetic construct
  misc_feature 1..27: note = Description of Artificial Sequence: Syntheticoligonucleotide
  source 1..27: mol_type = other RNA
aagatttaaagttatactatgaaagag

SEQ ID NO: 410 - RNA, 27 nt, synthetic construct
  misc_feature 1..27: note = Description of Artificial Sequence: Syntheticoligonucleotide
  source 1..27: mol_type = other RNA
aagaaaagatttaaagttatactatga

SEQ ID NO: 411 - RNA, 27 nt, synthetic construct
  misc_feature 1..27: note = Description of Artificial Sequence: Syntheticoligonucleotide
  source 1..27: mol_type = other RNA
gaagaaaagatttaaagttatactatg

SEQ ID NO: 412 - RNA, 27 nt, synthetic construct
  misc_feature 1..27: note = Description of Artificial Sequence: Syntheticoligonucleotide
  source 1..27: mol_type = other RNA
agactcaagttgaagaaaagatttaaa

SEQ ID NO: 413 - RNA, 27 nt, synthetic construct
  misc_feature 1..27: note = Description of Artificial Sequence: Syntheticoligonucleotide
  source 1..27: mol_type = other RNA
aagactcaagttgaagaaaagatttaa

SEQ ID NO: 414 - RNA, 27 nt, synthetic construct
  misc_feature 1..27: note = Description of Artificial Sequence: Syntheticoligonucleotide
  source 1..27: mol_type = other RNA
ttaaaactatcttcaaagactcaagtt

SEQ ID NO: 415 - RNA, 27 nt, synthetic construct
  misc_feature 1..27: note = Description of Artificial Sequence: Syntheticoligonucleotide
  source 1..27: mol_type = other RNA
aattaaaactatcttcaaagactcaag

SEQ ID NO: 416 - RNA, 27 nt, synthetic construct
  misc_feature 1..27: note = Description of Artificial Sequence: Syntheticoligonucleotide
  source 1..27: mol_type = other RNA
gaattaaaactatcttcaaagactcaa

SEQ ID NO: 417 - RNA, 27 nt, synthetic construct
  misc_feature 1..27: note = Description of Artificial Sequence: Syntheticoligonucleotide
  source 1..27: mol_type = other RNA
tgtcacaagcagaattaaaactatctt

SEQ ID NO: 418 - RNA, 27 nt, synthetic construct
  misc_feature 1..27: note = Description of Artificial Sequence: Syntheticoligonucleotide
  source 1..27: mol_type = other RNA
atgtcacaagcagaattaaaactatct

SEQ ID NO: 419 - RNA, 27 nt, synthetic construct
  misc_feature 1..27: note = Description of Artificial Sequence: Syntheticoligonucleotide
  source 1..27: mol_type = other RNA
aatgtcacaagcagaattaaaactatc

SEQ ID NO: 420 - RNA, 27 nt, synthetic construct
  misc_feature 1..27: note = Description of Artificial Sequence: Syntheticoligonucleotide
  source 1..27: mol_type = other RNA
ccaaataatcttttaatgtcacaagca

SEQ ID NO: 421 - RNA, 27 nt, synthetic construct
  misc_feature 1..27: note = Description of Artificial Sequence: Syntheticoligonucleotide
  source 1..27: mol_type = other RNA
gttttcttaagaaacaaaagcaatgct

SEQ ID NO: 422 - RNA, 27 nt, synthetic construct
  misc_feature 1..27: note = Description of Artificial Sequence: Syntheticoligonucleotide
  source 1..27: mol_type = other RNA
tgttttcttaagaaacaaaagcaatgc

SEQ ID NO: 423 - RNA, 27 nt, synthetic construct
  misc_feature 1..27: note = Description of Artificial Sequence: Syntheticoligonucleotide
  source 1..27: mol_type = other RNA
agagtttgttttcttaagaaacaaaag

SEQ ID NO: 424 - RNA, 27 nt, synthetic construct
  misc_feature 1..27: note = Description of Artificial Sequence: Syntheticoligonucleotide
  source 1..27: mol_type = other RNA
ttaaaaaagagtttgttttcttaagaa

SEQ ID NO: 425 - RNA, 27 nt, synthetic construct
  misc_feature 1..27: note = Description of Artificial Sequence: Syntheticoligonucleotide
  source 1..27: mol_type = other RNA
tttaaaaaagagtttgttttcttaaga

SEQ ID NO: 426 - RNA, 27 nt, synthetic construct
  misc_feature 1..27: note = Description of Artificial Sequence: Syntheticoligonucleotide
  source 1..27: mol_type = other RNA
ttttaaaaaagagtttgttttcttaag

SEQ ID NO: 427 - RNA, 27 nt, synthetic construct
  misc_feature 1..27: note = Description of Artificial Sequence: Syntheticoligonucleotide
  source 1..27: mol_type = other RNA
tttttaaaaaagagtttgttttcttaa

SEQ ID NO: 428 - RNA, 27 nt, synthetic construct
  misc_feature 1..27: note = Description of Artificial Sequence: Syntheticoligonucleotide
  source 1..27: mol_type = other RNA
atttttaaaaaagagtttgttttctta

SEQ ID NO: 429 - RNA, 27 nt, synthetic construct
  misc_feature 1..27: note = Description of Artificial Sequence: Syntheticoligonucleotide
  source 1..27: mol_type = other RNA
aatttttaaaaaagagtttgttttctt

SEQ ID NO: 430 - RNA, 27 nt, synthetic construct
  misc_feature 1..27: note = Description of Artificial Sequence: Syntheticoligonucleotide
  source 1..27: mol_type = other RNA
taatttttaaaaaagagtttgttttct

SEQ ID NO: 431 - RNA, 27 nt, synthetic construct
  misc_feature 1..27: note = Description of Artificial Sequence: Syntheticoligonucleotide
  source 1..27: mol_type = other RNA
aaagtaatttttaaaaaagagtttgtt

SEQ ID NO: 432 - RNA, 27 nt, synthetic construct
  misc_feature 1..27: note = Description of Artificial Sequence: Syntheticoligonucleotide
  source 1..27: mol_type = other RNA
tatttaaaagtaatttttaaaaaagag

SEQ ID NO: 433 - RNA, 27 nt, synthetic construct
  misc_feature 1..27: note = Description of Artificial Sequence: Syntheticoligonucleotide
  source 1..27: mol_type = other RNA
atatttaaaagtaatttttaaaaaaga

SEQ ID NO: 434 - RNA, 27 nt, synthetic construct
  misc_feature 1..27: note = Description of Artificial Sequence: Syntheticoligonucleotide
  source 1..27: mol_type = other RNA
aatatttaaaagtaatttttaaaaaag

SEQ ID NO: 435 - RNA, 27 nt, synthetic construct
  misc_feature 1..27: note = Description of Artificial Sequence: Syntheticoligonucleotide
  source 1..27: mol_type = other RNA
taatatttaaaagtaatttttaaaaaa

SEQ ID NO: 436 - RNA, 27 nt, synthetic construct
  misc_feature 1..27: note = Description of Artificial Sequence: Syntheticoligonucleotide
  source 1..27: mol_type = other RNA
ttaatatttaaaagtaatttttaaaaa

SEQ ID NO: 437 - RNA, 27 nt, synthetic construct
  misc_feature 1..27: note = Description of Artificial Sequence: Syntheticoligonucleotide
  source 1..27: mol_type = other RNA
gttaatatttaaaagtaatttttaaaa

SEQ ID NO: 438 - RNA, 27 nt, synthetic construct
  misc_feature 1..27: note = Description of Artificial Sequence: Syntheticoligonucleotide
  source 1..27: mol_type = other RNA
agttaatatttaaaagtaatttttaaa

SEQ ID NO: 439 - RNA, 27 nt, synthetic construct
  misc_feature 1..27: note = Description of Artificial Sequence: Syntheticoligonucleotide
  source 1..27: mol_type = other RNA
gagttaatatttaaaagtaatttttaa

SEQ ID NO: 440 - RNA, 27 nt, synthetic construct
  misc_feature 1..27: note = Description of Artificial Sequence: Syntheticoligonucleotide
  source 1..27: mol_type = other RNA
tgagttaatatttaaaagtaattttta

SEQ ID NO: 441 - RNA, 27 nt, synthetic construct
  misc_feature 1..27: note = Description of Artificial Sequence: Syntheticoligonucleotide
  source 1..27: mol_type = other RNA
caacttttgagttaatatttaaaagta

SEQ ID NO: 442 - RNA, 27 nt, synthetic construct
  misc_feature 1..27: note = Description of Artificial Sequence: Syntheticoligonucleotide
  source 1..27: mol_type = other RNA
tcaacttttgagttaatatttaaaagt

SEQ ID NO: 443 - RNA, 27 nt, synthetic construct
  misc_feature 1..27: note = Description of Artificial Sequence: Syntheticoligonucleotide
  source 1..27: mol_type = other RNA
tctcaacttttgagttaatatttaaaa

SEQ ID NO: 444 - RNA, 27 nt, synthetic construct
  misc_feature 1..27: note = Description of Artificial Sequence: Syntheticoligonucleotide
  source 1..27: mol_type = other RNA
aatctcaacttttgagttaatatttaa

SEQ ID NO: 445 - RNA, 27 nt, synthetic construct
  misc_feature 1..27: note = Description of Artificial Sequence: Syntheticoligonucleotide
  source 1..27: mol_type = other RNA
aaatctcaacttttgagttaatattta

SEQ ID NO: 446 - RNA, 27 nt, synthetic construct
  misc_feature 1..27: note = Description of Artificial Sequence: Syntheticoligonucleotide
  source 1..27: mol_type = other RNA
aaaatctcaacttttgagttaatattt

SEQ ID NO: 447 - RNA, 27 nt, synthetic construct
  misc_feature 1..27: note = Description of Artificial Sequence: Syntheticoligonucleotide
  source 1..27: mol_type = other RNA
caaaatctcaacttttgagttaatatt

SEQ ID NO: 448 - RNA, 27 nt, synthetic construct
  misc_feature 1..27: note = Description of Artificial Sequence: Syntheticoligonucleotide
  source 1..27: mol_type = other RNA
aaaaaaaaattaatgtcttggcacacc

SEQ ID NO: 449 - RNA, 27 nt, synthetic construct
  misc_feature 1..27: note = Description of Artificial Sequence: Syntheticoligonucleotide
  source 1..27: mol_type = other RNA
gtttaaaaaaaaaattaatgtcttggc

SEQ ID NO: 450 - RNA, 27 nt, synthetic construct
  misc_feature 1..27: note = Description of Artificial Sequence: Syntheticoligonucleotide
  source 1..27: mol_type = other RNA
tgtttaaaaaaaaaattaatgtcttgg

SEQ ID NO: 451 - RNA, 27 nt, synthetic construct
  misc_feature 1..27: note = Description of Artificial Sequence: Syntheticoligonucleotide
  source 1..27: mol_type = other RNA
cttcattgtttaaaaaaaaaattaatg

SEQ ID NO: 452 - RNA, 27 nt, synthetic construct
  misc_feature 1..27: note = Description of Artificial Sequence: Syntheticoligonucleotide
  source 1..27: mol_type = other RNA
acttcattgtttaaaaaaaaaattaat

SEQ ID NO: 453 - RNA, 27 nt, synthetic construct
  misc_feature 1..27: note = Description of Artificial Sequence: Syntheticoligonucleotide
  source 1..27: mol_type = other RNA
tcacttcattgtttaaaaaaaaaatta

SEQ ID NO: 454 - RNA, 27 nt, synthetic construct
  misc_feature 1..27: note = Description of Artificial Sequence: Syntheticoligonucleotide
  source 1..27: mol_type = other RNA
tttcacttcattgtttaaaaaaaaaat

SEQ ID NO: 455 - RNA, 27 nt, synthetic construct
  misc_feature 1..27: note = Description of Artificial Sequence: Syntheticoligonucleotide
  source 1..27: mol_type = other RNA
ttttcacttcattgtttaaaaaaaaaa

SEQ ID NO: 456 - RNA, 27 nt, synthetic construct
  misc_feature 1..27: note = Description of Artificial Sequence: Syntheticoligonucleotide
  source 1..27: mol_type = other RNA
tttttcacttcattgtttaaaaaaaaa

SEQ ID NO: 457 - RNA, 27 nt, synthetic construct
  misc_feature 1..27: note = Description of Artificial Sequence: Syntheticoligonucleotide
  source 1..27: mol_type = other RNA
ctttttcacttcattgtttaaaaaaaa

SEQ ID NO: 458 - RNA, 27 nt, synthetic construct
  misc_feature 1..27: note = Description of Artificial Sequence: Syntheticoligonucleotide
  source 1..27: mol_type = other RNA
actttttcacttcattgtttaaaaaaa

SEQ ID NO: 459 - RNA, 27 nt, synthetic construct
  misc_feature 1..27: note = Description of Artificial Sequence: Syntheticoligonucleotide
  source 1..27: mol_type = other RNA
aaactttttcacttcattgtttaaaaa

SEQ ID NO: 460 - RNA, 27 nt, synthetic construct
  misc_feature 1..27: note = Description of Artificial Sequence: Syntheticoligonucleotide
  source 1..27: mol_type = other RNA
aaaactttttcacttcattgtttaaaa

SEQ ID NO: 461 - RNA, 27 nt, synthetic construct
  misc_feature 1..27: note = Description of Artificial Sequence: Syntheticoligonucleotide
  source 1..27: mol_type = other RNA
taaaactttttcacttcattgtttaaa

SEQ ID NO: 462 - RNA, 27 nt, synthetic construct
  misc_feature 1..27: note = Description of Artificial Sequence: Syntheticoligonucleotide
  source 1..27: mol_type = other RNA
agagattgtaaaactttttcacttcat

SEQ ID NO: 463 - RNA, 27 nt, synthetic construct
  misc_feature 1..27: note = Description of Artificial Sequence: Syntheticoligonucleotide
  source 1..27: mol_type = other RNA
aaacctagagattgtaaaactttttca

SEQ ID NO: 464 - RNA, 27 nt, synthetic construct
  misc_feature 1..27: note = Description of Artificial Sequence: Syntheticoligonucleotide
  source 1..27: mol_type = other RNA
caaacctagagattgtaaaactttttc

SEQ ID NO: 465 - RNA, 27 nt, synthetic construct
  misc_feature 1..27: note = Description of Artificial Sequence: Syntheticoligonucleotide
  source 1..27: mol_type = other RNA
ccaaacctagagattgtaaaacttttt

SEQ ID NO: 466 - RNA, 27 nt, synthetic construct
  misc_feature 1..27: note = Description of Artificial Sequence: Syntheticoligonucleotide
  source 1..27: mol_type = other RNA
tgtttatgcaatgttaatttaaccagt

SEQ ID NO: 467 - RNA, 27 nt, synthetic construct
  misc_feature 1..27: note = Description of Artificial Sequence: Syntheticoligonucleotide
  source 1..27: mol_type = other RNA
gtgtttatgcaatgttaatttaaccag

SEQ ID NO: 468 - RNA, 27 nt, synthetic construct
  misc_feature 1..27: note = Description of Artificial Sequence: Syntheticoligonucleotide
  source 1..27: mol_type = other RNA
agtgtttatgcaatgttaatttaacca

SEQ ID NO: 469 - RNA, 27 nt, synthetic construct
  misc_feature 1..27: note = Description of Artificial Sequence: Syntheticoligonucleotide
  source 1..27: mol_type = other RNA
cagacttgaaaagtgtttatgcaatgt

SEQ ID NO: 470 - RNA, 27 nt, synthetic construct
  misc_feature 1..27: note = Description of Artificial Sequence: Syntheticoligonucleotide
  source 1..27: mol_type = other RNA
gcattattaaatatggatcagacttga

SEQ ID NO: 471 - RNA, 27 nt, synthetic construct
  misc_feature 1..27: note = Description of Artificial Sequence: Syntheticoligonucleotide
  source 1..27: mol_type = other RNA
ttattttaaagcattattaaatatgga

SEQ ID NO: 472 - RNA, 27 nt, synthetic construct
  misc_feature 1..27: note = Description of Artificial Sequence: Syntheticoligonucleotide
  source 1..27: mol_type = other RNA
tttattttaaagcattattaaatatgg

SEQ ID NO: 473 - RNA, 27 nt, synthetic construct
  misc_feature 1..27: note = Description of Artificial Sequence: Syntheticoligonucleotide
  source 1..27: mol_type = other RNA
ttttattttaaagcattattaaatatg

SEQ ID NO: 474 - RNA, 27 nt, synthetic construct
  misc_feature 1..27: note = Description of Artificial Sequence: Syntheticoligonucleotide
  source 1..27: mol_type = other RNA
tttttattttaaagcattattaaatat

SEQ ID NO: 475 - RNA, 27 nt, synthetic construct
  misc_feature 1..27: note = Description of Artificial Sequence: Syntheticoligonucleotide
  source 1..27: mol_type = other RNA
atttttattttaaagcattattaaata

SEQ ID NO: 476 - RNA, 27 nt, synthetic construct
  misc_feature 1..27: note = Description of Artificial Sequence: Syntheticoligonucleotide
  source 1..27: mol_type = other RNA
tatttttattttaaagcattattaaat

SEQ ID NO: 477 - RNA, 27 nt, synthetic construct
  misc_feature 1..27: note = Description of Artificial Sequence: Syntheticoligonucleotide
  source 1..27: mol_type = other RNA
tttatttttattttaaagcattattaa

SEQ ID NO: 478 - RNA, 27 nt, synthetic construct
  misc_feature 1..27: note = Description of Artificial Sequence: Syntheticoligonucleotide
  source 1..27: mol_type = other RNA
ttttatttttattttaaagcattatta

SEQ ID NO: 479 - RNA, 27 nt, synthetic construct
  misc_feature 1..27: note = Description of Artificial Sequence: Syntheticoligonucleotide
  source 1..27: mol_type = other RNA
tttttatttttattttaaagcattatt

SEQ ID NO: 480 - RNA, 27 nt, synthetic construct
  misc_feature 1..27: note = Description of Artificial Sequence: Syntheticoligonucleotide
  source 1..27: mol_type = other RNA
gtttttatttttattttaaagcattat

SEQ ID NO: 481 - RNA, 27 nt, synthetic construct
  misc_feature 1..27: note = Description of Artificial Sequence: Syntheticoligonucleotide
  source 1..27: mol_type = other RNA
aaggattgtttttatttttattttaaa

SEQ ID NO: 482 - RNA, 27 nt, synthetic construct
  misc_feature 1..27: note = Description of Artificial Sequence: Syntheticoligonucleotide
  source 1..27: mol_type = other RNA
tatcaaaaggattgtttttatttttat

SEQ ID NO: 483 - RNA, 27 nt, synthetic construct
  misc_feature 1..27: note = Description of Artificial Sequence: Syntheticoligonucleotide
  source 1..27: mol_type = other RNA
ttatcaaaaggattgtttttattttta

SEQ ID NO: 484 - RNA, 27 nt, synthetic construct
  misc_feature 1..27: note = Description of Artificial Sequence: Syntheticoligonucleotide
  source 1..27: mol_type = other RNA
tttatcaaaaggattgtttttattttt

SEQ ID NO: 485 - RNA, 27 nt, synthetic construct
  misc_feature 1..27: note = Description of Artificial Sequence: Syntheticoligonucleotide
  source 1..27: mol_type = other RNA
atttatcaaaaggattgtttttatttt

SEQ ID NO: 486 - RNA, 27 nt, synthetic construct
  misc_feature 1..27: note = Description of Artificial Sequence: Syntheticoligonucleotide
  source 1..27: mol_type = other RNA
aatttatcaaaaggattgtttttattt

SEQ ID NO: 487 - RNA, 27 nt, synthetic construct
  misc_feature 1..27: note = Description of Artificial Sequence: Syntheticoligonucleotide
  source 1..27: mol_type = other RNA
aaatttatcaaaaggattgtttttatt

SEQ ID NO: 488 - RNA, 27 nt, synthetic construct
  misc_feature 1..27: note = Description of Artificial Sequence: Syntheticoligonucleotide
  source 1..27: mol_type = other RNA
taaatttatcaaaaggattgtttttat

SEQ ID NO: 489 - RNA, 27 nt, synthetic construct
  misc_feature 1..27: note = Description of Artificial Sequence: Syntheticoligonucleotide
  source 1..27: mol_type = other RNA
ttaaatttatcaaaaggattgttttta

SEQ ID NO: 490 - RNA, 27 nt, synthetic construct
  misc_feature 1..27: note = Description of Artificial Sequence: Syntheticoligonucleotide
  source 1..27: mol_type = other RNA
cattttaaatttatcaaaaggattgtt

SEQ ID NO: 491 - RNA, 27 nt, synthetic construct
  misc_feature 1..27: note = Description of Artificial Sequence: Syntheticoligonucleotide
  source 1..27: mol_type = other RNA
agtaacattttaaatttatcaaaagga

SEQ ID NO: 492 - RNA, 27 nt, synthetic construct
  misc_feature 1..27: note = Description of Artificial Sequence: Syntheticoligonucleotide
  source 1..27: mol_type = other RNA
aagtaacattttaaatttatcaaaagg

SEQ ID NO: 493 - RNA, 27 nt, synthetic construct
  misc_feature 1..27: note = Description of Artificial Sequence: Syntheticoligonucleotide
  source 1..27: mol_type = other RNA
taagtaacattttaaatttatcaaaag

SEQ ID NO: 494 - RNA, 27 nt, synthetic construct
  misc_feature 1..27: note = Description of Artificial Sequence: Syntheticoligonucleotide
  source 1..27: mol_type = other RNA
aaaataagtaacattttaaatttatca

SEQ ID NO: 495 - RNA, 27 nt, synthetic construct
  misc_feature 1..27: note = Description of Artificial Sequence: Syntheticoligonucleotide
  source 1..27: mol_type = other RNA
taaaataagtaacattttaaatttatc

SEQ ID NO: 496 - RNA, 27 nt, synthetic construct
  misc_feature 1..27: note = Description of Artificial Sequence: Syntheticoligonucleotide
  source 1..27: mol_type = other RNA
ttaaaataagtaacattttaaatttat

SEQ ID NO: 497 - RNA, 27 nt, synthetic construct
  misc_feature 1..27: note = Description of Artificial Sequence: Syntheticoligonucleotide
  source 1..27: mol_type = other RNA
tttaaaataagtaacattttaaattta

SEQ ID NO: 498 - RNA, 27 nt, synthetic construct
  misc_feature 1..27: note = Description of Artificial Sequence: Syntheticoligonucleotide
  source 1..27: mol_type = other RNA
ttttaaaataagtaacattttaaattt

SEQ ID NO: 499 - RNA, 27 nt, synthetic construct
  misc_feature 1..27: note = Description of Artificial Sequence: Syntheticoligonucleotide
  source 1..27: mol_type = other RNA
attttaaaataagtaacattttaaatt

SEQ ID NO: 500 - RNA, 27 nt, synthetic construct
  misc_feature 1..27: note = Description of Artificial Sequence: Syntheticoligonucleotide
  source 1..27: mol_type = other RNA
ttattttaaaataagtaacattttaaa

SEQ ID NO: 501 - RNA, 27 nt, synthetic construct
  misc_feature 1..27: note = Description of Artificial Sequence: Syntheticoligonucleotide
  source 1..27: mol_type = other RNA
tttattttaaaataagtaacattttaa

SEQ ID NO: 502 - RNA, 27 nt, synthetic construct
  misc_feature 1..27: note = Description of Artificial Sequence: Syntheticoligonucleotide
  source 1..27: mol_type = other RNA
atttattttaaaataagtaacatttta

SEQ ID NO: 503 - RNA, 27 nt, synthetic construct
  misc_feature 1..27: note = Description of Artificial Sequence: Syntheticoligonucleotide
  source 1..27: mol_type = other RNA
catttattttaaaataagtaacatttt

SEQ ID NO: 504 - RNA, 27 nt, synthetic construct
  misc_feature 1..27: note = Description of Artificial Sequence: Syntheticoligonucleotide
  source 1..27: mol_type = other RNA
tcatttattttaaaataagtaacattt

SEQ ID NO: 505 - RNA, 27 nt, synthetic construct
  misc_feature 1..27: note = Description of Artificial Sequence: Syntheticoligonucleotide
  source 1..27: mol_type = other RNA
cttcatttattttaaaataagtaacat

SEQ ID NO: 506 - RNA, 27 nt, synthetic construct
  misc_feature 1..27: note = Description of Artificial Sequence: Syntheticoligonucleotide
  source 1..27: mol_type = other RNA
tctcacttcatttattttaaaataagt

SEQ ID NO: 507 - RNA, 27 nt, synthetic construct
  misc_feature 1..27: note = Description of Artificial Sequence: Syntheticoligonucleotide
  source 1..27: mol_type = other RNA
catctcacttcatttattttaaaataa

SEQ ID NO: 508 - RNA, 27 nt, synthetic construct
  misc_feature 1..27: note = Description of Artificial Sequence: Syntheticoligonucleotide
  source 1..27: mol_type = other RNA
ccatctcacttcatttattttaaaata

SEQ ID NO: 509 - RNA, 27 nt, synthetic construct
  misc_feature 1..27: note = Description of Artificial Sequence: Syntheticoligonucleotide
  source 1..27: mol_type = other RNA
atgccatctcacttcatttattttaaa

SEQ ID NO: 510 - RNA, 27 nt, synthetic construct
  misc_feature 1..27: note = Description of Artificial Sequence: Syntheticoligonucleotide
  source 1..27: mol_type = other RNA
catgccatctcacttcatttattttaa

SEQ ID NO: 511 - RNA, 27 nt, synthetic construct
  misc_feature 1..27: note = Description of Artificial Sequence: Syntheticoligonucleotide
  source 1..27: mol_type = other RNA
tgacttcttttaacatgaagaaatgga

SEQ ID NO: 512 - RNA, 27 nt, synthetic construct
  misc_feature 1..27: note = Description of Artificial Sequence: Syntheticoligonucleotide
  source 1..27: mol_type = other RNA
atgacttcttttaacatgaagaaatgg

SEQ ID NO: 513 - RNA, 27 nt, synthetic construct
  misc_feature 1..27: note = Description of Artificial Sequence: Syntheticoligonucleotide
  source 1..27: mol_type = other RNA
gtaaaaaaaaaaaactaagagtttgag

SEQ ID NO: 514 - RNA, 27 nt, synthetic construct
  misc_feature 1..27: note = Description of Artificial Sequence: Syntheticoligonucleotide
  source 1..27: mol_type = other RNA
ttacatagttgtaaaaaaaaaaaacta

SEQ ID NO: 515 - RNA, 27 nt, synthetic construct
  misc_feature 1..27: note = Description of Artificial Sequence: Syntheticoligonucleotide
  source 1..27: mol_type = other RNA
attacatagttgtaaaaaaaaaaaact

SEQ ID NO: 516 - RNA, 27 nt, synthetic construct
  misc_feature 1..27: note = Description of Artificial Sequence: Syntheticoligonucleotide
  source 1..27: mol_type = other RNA
aattacatagttgtaaaaaaaaaaaac

SEQ ID NO: 517 - RNA, 27 nt, synthetic construct
  misc_feature 1..27: note = Description of Artificial Sequence: Syntheticoligonucleotide
  source 1..27: mol_type = other RNA
aaattacatagttgtaaaaaaaaaaaa

SEQ ID NO: 518 - RNA, 27 nt, synthetic construct
  misc_feature 1..27: note = Description of Artificial Sequence: Syntheticoligonucleotide
  source 1..27: mol_type = other RNA
taaattacatagttgtaaaaaaaaaaa

SEQ ID NO: 519 - RNA, 27 nt, synthetic construct
  misc_feature 1..27: note = Description of Artificial Sequence: Syntheticoligonucleotide
  source 1..27: mol_type = other RNA
ataaattacatagttgtaaaaaaaaaa

SEQ ID NO: 520 - RNA, 27 nt, synthetic construct
  misc_feature 1..27: note = Description of Artificial Sequence: Syntheticoligonucleotide
  source 1..27: mol_type = other RNA
tataaattacatagttgtaaaaaaaaa

SEQ ID NO: 521 - RNA, 27 nt, synthetic construct
  misc_feature 1..27: note = Description of Artificial Sequence: Syntheticoligonucleotide
  source 1..27: mol_type = other RNA
atataaattacatagttgtaaaaaaaa

SEQ ID NO: 522 - RNA, 27 nt, synthetic construct
  misc_feature 1..27: note = Description of Artificial Sequence: Syntheticoligonucleotide
  source 1..27: mol_type = other RNA
aatataaattacatagttgtaaaaaaa

SEQ ID NO: 523 - RNA, 27 nt, synthetic construct
  misc_feature 1..27: note = Description of Artificial Sequence: Syntheticoligonucleotide
  source 1..27: mol_type = other RNA
gaatataaattacatagttgtaaaaaa

SEQ ID NO: 524 - RNA, 27 nt, synthetic construct
  misc_feature 1..27: note = Description of Artificial Sequence: Syntheticoligonucleotide
  source 1..27: mol_type = other RNA
ggaatataaattacatagttgtaaaaa

SEQ ID NO: 525 - RNA, 27 nt, synthetic construct
  misc_feature 1..27: note = Description of Artificial Sequence: Syntheticoligonucleotide
  source 1..27: mol_type = other RNA
tgtaaatggaatataaattacatagtt

SEQ ID NO: 526 - RNA, 27 nt, synthetic construct
  misc_feature 1..27: note = Description of Artificial Sequence: Syntheticoligonucleotide
  source 1..27: mol_type = other RNA
atgtaaatggaatataaattacatagt

SEQ ID NO: 527 - RNA, 27 nt, synthetic construct
  misc_feature 1..27: note = Description of Artificial Sequence: Syntheticoligonucleotide
  source 1..27: mol_type = other RNA
tatgtaaatggaatataaattacatag

SEQ ID NO: 528 - RNA, 27 nt, synthetic construct
  misc_feature 1..27: note = Description of Artificial Sequence: Syntheticoligonucleotide
  source 1..27: mol_type = other RNA
tatccttatgtaaatggaatataaatt

SEQ ID NO: 529 - RNA, 27 nt, synthetic construct
  misc_feature 1..27: note = Description of Artificial Sequence: Syntheticoligonucleotide
  source 1..27: mol_type = other RNA
gtatccttatgtaaatggaatataaat

SEQ ID NO: 530 - RNA, 27 nt, synthetic construct
  misc_feature 1..27: note = Description of Artificial Sequence: Syntheticoligonucleotide
  source 1..27: mol_type = other RNA
tgtatccttatgtaaatggaatataaa

SEQ ID NO: 531 - RNA, 27 nt, synthetic construct
  misc_feature 1..27: note = Description of Artificial Sequence: Syntheticoligonucleotide
  source 1..27: mol_type = other RNA
gtgtatccttatgtaaatggaatataa

SEQ ID NO: 532 - RNA, 27 nt, synthetic construct
  misc_feature 1..27: note = Description of Artificial Sequence: Syntheticoligonucleotide
  source 1..27: mol_type = other RNA
cttgacaaataagtgtatccttatgta

SEQ ID NO: 533 - RNA, 27 nt, synthetic construct
  misc_feature 1..27: note = Description of Artificial Sequence: Syntheticoligonucleotide
  source 1..27: mol_type = other RNA
tgagcttgacaaataagtgtatcctta

SEQ ID NO: 534 - RNA, 27 nt, synthetic construct
  misc_feature 1..27: note = Description of Artificial Sequence: Syntheticoligonucleotide
  source 1..27: mol_type = other RNA
tgtaacataggttaaaaatttacagat

SEQ ID NO: 535 - RNA, 27 nt, synthetic construct
  misc_feature 1..27: note = Description of Artificial Sequence: Syntheticoligonucleotide
  source 1..27: mol_type = other RNA
gtgtaacataggttaaaaatttacaga

SEQ ID NO: 536 - RNA, 27 nt, synthetic construct
  misc_feature 1..27: note = Description of Artificial Sequence: Syntheticoligonucleotide
  source 1..27: mol_type = other RNA
ggtgtaacataggttaaaaatttacag

SEQ ID NO: 537 - RNA, 27 nt, synthetic construct
  misc_feature 1..27: note = Description of Artificial Sequence: Syntheticoligonucleotide
  source 1..27: mol_type = other RNA
attcaaatataaacttcacctcttgca

SEQ ID NO: 538 - RNA, 27 nt, synthetic construct
  misc_feature 1..27: note = Description of Artificial Sequence: Syntheticoligonucleotide
  source 1..27: mol_type = other RNA
atattcaaatataaacttcacctcttg

SEQ ID NO: 539 - RNA, 27 nt, synthetic construct
  misc_feature 1..27: note = Description of Artificial Sequence: Syntheticoligonucleotide
  source 1..27: mol_type = other RNA
gatattcaaatataaacttcacctctt

SEQ ID NO: 540 - RNA, 27 nt, synthetic construct
  misc_feature 1..27: note = Description of Artificial Sequence: Syntheticoligonucleotide
  source 1..27: mol_type = other RNA
tggatattcaaatataaacttcacctc

SEQ ID NO: 541 - RNA, 27 nt, synthetic construct
  misc_feature 1..27: note = Description of Artificial Sequence: Syntheticoligonucleotide
  source 1..27: mol_type = other RNA
atggatattcaaatataaacttcacct

SEQ ID NO: 542 - RNA, 27 nt, synthetic construct
  misc_feature 1..27: note = Description of Artificial Sequence: Syntheticoligonucleotide
  source 1..27: mol_type = other RNA
cgagaatggatattcaaatataaactt

SEQ ID NO: 543 - RNA, 27 nt, synthetic construct
  misc_feature 1..27: note = Description of Artificial Sequence: Syntheticoligonucleotide
  source 1..27: mol_type = other RNA
attacaagtattaaaactgcatcaagt

SEQ ID NO: 544 - RNA, 27 nt, synthetic construct
  misc_feature 1..27: note = Description of Artificial Sequence: Syntheticoligonucleotide
  source 1..27: mol_type = other RNA
gaattacaagtattaaaactgcatcaa

SEQ ID NO: 545 - RNA, 27 nt, synthetic construct
  misc_feature 1..27: note = Description of Artificial Sequence: Syntheticoligonucleotide
  source 1..27: mol_type = other RNA
cctgaaaattagtgattaggtcaaatc

SEQ ID NO: 546 - RNA, 27 nt, synthetic construct
  misc_feature 1..27: note = Description of Artificial Sequence: Syntheticoligonucleotide
  source 1..27: mol_type = other RNA
ccaccacctgaaaattagtgattaggt

SEQ ID NO: 547 - RNA, 27 nt, synthetic construct
  misc_feature 1..27: note = Description of Artificial Sequence: Syntheticoligonucleotide
  source 1..27: mol_type = other RNA
tcataccaggtttgaaaaatcctactg

SEQ ID NO: 548 - RNA, 27 nt, synthetic construct
  misc_feature 1..27: note = Description of Artificial Sequence: Syntheticoligonucleotide
  source 1..27: mol_type = other RNA
ctatctttattaaattctccttccact

SEQ ID NO: 549 - RNA, 27 nt, synthetic construct
  misc_feature 1..27: note = Description of Artificial Sequence: Syntheticoligonucleotide
  source 1..27: mol_type = other RNA
gcactatctttattaaattctccttcc

SEQ ID NO: 550 - RNA, 27 nt, synthetic construct
  misc_feature 1..27: note = Description of Artificial Sequence: Syntheticoligonucleotide
  source 1..27: mol_type = other RNA
cagcactatctttattaaattctcctt

SEQ ID NO: 551 - RNA, 27 nt, synthetic construct
  misc_feature 1..27: note = Description of Artificial Sequence: Syntheticoligonucleotide
  source 1..27: mol_type = other RNA
tcagcactatctttattaaattctcct

SEQ ID NO: 552 - RNA, 27 nt, synthetic construct
  misc_feature 1..27: note = Description of Artificial Sequence: Syntheticoligonucleotide
  source 1..27: mol_type = other RNA
tctttcagcactatctttattaaattc

SEQ ID NO: 553 - RNA, 27 nt, synthetic construct
  misc_feature 1..27: note = Description of Artificial Sequence: Syntheticoligonucleotide
  source 1..27: mol_type = other RNA
tagtcctagttatagattacctaagga

SEQ ID NO: 554 - RNA, 27 nt, synthetic construct
  misc_feature 1..27: note = Description of Artificial Sequence: Syntheticoligonucleotide
  source 1..27: mol_type = other RNA
gtagtcctagttatagattacctaagg

SEQ ID NO: 555 - RNA, 27 nt, synthetic construct
  misc_feature 1..27: note = Description of Artificial Sequence: Syntheticoligonucleotide
  source 1..27: mol_type = other RNA
actaaaacaatggaatgtattactgtt

SEQ ID NO: 556 - RNA, 27 nt, synthetic construct
  misc_feature 1..27: note = Description of Artificial Sequence: Syntheticoligonucleotide
  source 1..27: mol_type = other RNA
ttactaaaacaatggaatgtattactg

SEQ ID NO: 557 - RNA, 27 nt, synthetic construct
  misc_feature 1..27: note = Description of Artificial Sequence: Syntheticoligonucleotide
  source 1..27: mol_type = other RNA
gttactaaaacaatggaatgtattact

SEQ ID NO: 558 - RNA, 27 nt, synthetic construct
  misc_feature 1..27: note = Description of Artificial Sequence: Syntheticoligonucleotide
  source 1..27: mol_type = other RNA
ggttactaaaacaatggaatgtattac

SEQ ID NO: 559 - RNA, 27 nt, synthetic construct
  misc_feature 1..27: note = Description of Artificial Sequence: Syntheticoligonucleotide
  source 1..27: mol_type = other RNA
gaagatttctggttactaaaacaatgg

SEQ ID NO: 560 - RNA, 27 nt, synthetic construct
  misc_feature 1..27: note = Description of Artificial Sequence: Syntheticoligonucleotide
  source 1..27: mol_type = other RNA
atttttcattgcatgaagatttctggt

SEQ ID NO: 561 - RNA, 27 nt, synthetic construct
  misc_feature 1..27: note = Description of Artificial Sequence: Syntheticoligonucleotide
  source 1..27: mol_type = other RNA
gaattaaagtatttttcattgcatgaa

SEQ ID NO: 562 - RNA, 27 nt, synthetic construct
  misc_feature 1..27: note = Description of Artificial Sequence: Syntheticoligonucleotide
  source 1..27: mol_type = other RNA
gcttcatgaattaaagtatttttcatt

SEQ ID NO: 563 - RNA, 27 nt, synthetic construct
  misc_feature 1..27: note = Description of Artificial Sequence: Syntheticoligonucleotide
  source 1..27: mol_type = other RNA
aagcttcatgaattaaagtatttttca

SEQ ID NO: 564 - RNA, 27 nt, synthetic construct
  misc_feature 1..27: note = Description of Artificial Sequence: Syntheticoligonucleotide
  source 1..27: mol_type = other RNA
taagcttcatgaattaaagtatttttc

SEQ ID NO: 565 - RNA, 27 nt, synthetic construct
  misc_feature 1..27: note = Description of Artificial Sequence: Syntheticoligonucleotide
  source 1..27: mol_type = other RNA
ccaaaaaaaaaaagtaagcttcatgaa

SEQ ID NO: 566 - RNA, 27 nt, synthetic construct
  misc_feature 1..27: note = Description of Artificial Sequence: Syntheticoligonucleotide
  source 1..27: mol_type = other RNA
acaccaaaaaaaaaaagtaagcttcat

SEQ ID NO: 567 - RNA, 27 nt, synthetic construct
  misc_feature 1..27: note = Description of Artificial Sequence: Syntheticoligonucleotide
  source 1..27: mol_type = other RNA
tctgacaccaaaaaaaaaaagtaagct

SEQ ID NO: 568 - RNA, 27 nt, synthetic construct
  misc_feature 1..27: note = Description of Artificial Sequence: Syntheticoligonucleotide
  source 1..27: mol_type = other RNA
agactctgacaccaaaaaaaaaaagta

SEQ ID NO: 569 - RNA, 27 nt, synthetic construct
  misc_feature 1..27: note = Description of Artificial Sequence: Syntheticoligonucleotide
  source 1..27: mol_type = other RNA
gagactctgacaccaaaaaaaaaaagt

SEQ ID NO: 570 - RNA, 27 nt, synthetic construct
  misc_feature 1..27: note = Description of Artificial Sequence: Syntheticoligonucleotide
  source 1..27: mol_type = other RNA
tctctcctaaaaatacaaaaattagtt

SEQ ID NO: 571 - RNA, 27 nt, synthetic construct
  misc_feature 1..27: note = Description of Artificial Sequence: Syntheticoligonucleotide
  source 1..27: mol_type = other RNA
ccgtctctcctaaaaatacaaaaatta

SEQ ID NO: 572 - RNA, 27 nt, synthetic construct
  misc_feature 1..27: note = Description of Artificial Sequence: Syntheticoligonucleotide
  source 1..27: mol_type = other RNA
tcaataaatatttgctgaataaatgag

SEQ ID NO: 573 - RNA, 27 nt, synthetic construct
  misc_feature 1..27: note = Description of Artificial Sequence: Syntheticoligonucleotide
  source 1..27: mol_type = other RNA
actcaataaatatttgctgaataaatg

SEQ ID NO: 574 - RNA, 27 nt, synthetic construct
  misc_feature 1..27: note = Description of Artificial Sequence: Syntheticoligonucleotide
  source 1..27: mol_type = other RNA
gcactcaataaatatttgctgaataaa

SEQ ID NO: 575 - RNA, 27 nt, synthetic construct
  misc_feature 1..27: note = Description of Artificial Sequence: Syntheticoligonucleotide
  source 1..27: mol_type = other RNA
aaaccccttctttgcaaaactaaaata

SEQ ID NO: 576 - RNA, 27 nt, synthetic construct
  misc_feature 1..27: note = Description of Artificial Sequence: Syntheticoligonucleotide
  source 1..27: mol_type = other RNA
tggaatcgtagcaaaacaattatagag

SEQ ID NO: 577 - RNA, 27 nt, synthetic construct
  misc_feature 1..27: note = Description of Artificial Sequence: Syntheticoligonucleotide
  source 1..27: mol_type = other RNA
aaacaatgaagtgatttacataaagta

SEQ ID NO: 578 - RNA, 27 nt, synthetic construct
  misc_feature 1..27: note = Description of Artificial Sequence: Syntheticoligonucleotide
  source 1..27: mol_type = other RNA
aaaacaatgaagtgatttacataaagt

SEQ ID NO: 579 - RNA, 27 nt, synthetic construct
  misc_feature 1..27: note = Description of Artificial Sequence: Syntheticoligonucleotide
  source 1..27: mol_type = other RNA
taaaacaatgaagtgatttacataaag

SEQ ID NO: 580 - RNA, 27 nt, synthetic construct
  misc_feature 1..27: note = Description of Artificial Sequence: Syntheticoligonucleotide
  source 1..27: mol_type = other RNA
ttaaaacaatgaagtgatttacataaa

SEQ ID NO: 581 - RNA, 27 nt, synthetic construct
  misc_feature 1..27: note = Description of Artificial Sequence: Syntheticoligonucleotide
  source 1..27: mol_type = other RNA
tttaaaacaatgaagtgatttacataa

SEQ ID NO: 582 - RNA, 27 nt, synthetic construct
  misc_feature 1..27: note = Description of Artificial Sequence: Syntheticoligonucleotide
  source 1..27: mol_type = other RNA
ctttaaaacaatgaagtgatttacata

SEQ ID NO: 583 - RNA, 27 nt, synthetic construct
  misc_feature 1..27: note = Description of Artificial Sequence: Syntheticoligonucleotide
  source 1..27: mol_type = other RNA
cctttaaaacaatgaagtgatttacat

SEQ ID NO: 584 - RNA, 27 nt, synthetic construct
  misc_feature 1..27: note = Description of Artificial Sequence: Syntheticoligonucleotide
  source 1..27: mol_type = other RNA
taatcaagtttattcctttaaaacaat

SEQ ID NO: 585 - RNA, 27 nt, synthetic construct
  misc_feature 1..27: note = Description of Artificial Sequence: Syntheticoligonucleotide
  source 1..27: mol_type = other RNA
ataatcaagtttattcctttaaaacaa

SEQ ID NO: 586 - RNA, 27 nt, synthetic construct
  misc_feature 1..27: note = Description of Artificial Sequence: Syntheticoligonucleotide
  source 1..27: mol_type = other RNA
aatataatcaagtttattcctttaaaa

SEQ ID NO: 587 - RNA, 27 nt, synthetic construct
  misc_feature 1..27: note = Description of Artificial Sequence: Syntheticoligonucleotide
  source 1..27: mol_type = other RNA
caatataatcaagtttattcctttaaa

SEQ ID NO: 588 - RNA, 27 nt, synthetic construct
  misc_feature 1..27: note = Description of Artificial Sequence: Syntheticoligonucleotide
  source 1..27: mol_type = other RNA
acaatataatcaagtttattcctttaa

SEQ ID NO: 589 - RNA, 27 nt, synthetic construct
  misc_feature 1..27: note = Description of Artificial Sequence: Syntheticoligonucleotide
  source 1..27: mol_type = other RNA
aaacaatataatcaagtttattccttt

SEQ ID NO: 590 - RNA, 27 nt, synthetic construct
  misc_feature 1..27: note = Description of Artificial Sequence: Syntheticoligonucleotide
  source 1..27: mol_type = other RNA
aaaacaatataatcaagtttattcctt

SEQ ID NO: 591 - RNA, 27 nt, synthetic construct
  misc_feature 1..27: note = Description of Artificial Sequence: Syntheticoligonucleotide
  source 1..27: mol_type = other RNA
aaaaacaatataatcaagtttattcct

SEQ ID NO: 592 - RNA, 27 nt, synthetic construct
  misc_feature 1..27: note = Description of Artificial Sequence: Syntheticoligonucleotide
  source 1..27: mol_type = other RNA
aaaaaacaatataatcaagtttattcc

SEQ ID NO: 593 - RNA, 27 nt, synthetic construct
  misc_feature 1..27: note = Description of Artificial Sequence: Syntheticoligonucleotide
  source 1..27: mol_type = other RNA
aaaaaaacaatataatcaagtttattc

SEQ ID NO: 594 - RNA, 27 nt, synthetic construct
  misc_feature 1..27: note = Description of Artificial Sequence: Syntheticoligonucleotide
  source 1..27: mol_type = other RNA
caaataaaaaaacaatataatcaagtt

SEQ ID NO: 595 - RNA, 27 nt, synthetic construct
  misc_feature 1..27: note = Description of Artificial Sequence: Syntheticoligonucleotide
  source 1..27: mol_type = other RNA
ccaaataaaaaaacaatataatcaagt

SEQ ID NO: 596 - RNA, 27 nt, synthetic construct
  misc_feature 1..27: note = Description of Artificial Sequence: Syntheticoligonucleotide
  source 1..27: mol_type = other RNA
atgccaaataaaaaaacaatataatca

SEQ ID NO: 597 - RNA, 27 nt, synthetic construct
  misc_feature 1..27: note = Description of Artificial Sequence: Syntheticoligonucleotide
  source 1..27: mol_type = other RNA
cagttatgccaaataaaaaaacaatat

SEQ ID NO: 598 - RNA, 27 nt, synthetic construct
  misc_feature 1..27: note = Description of Artificial Sequence: Syntheticoligonucleotide
  source 1..27: mol_type = other RNA
acagttatgccaaataaaaaaacaata

SEQ ID NO: 599 - RNA, 27 nt, synthetic construct
  misc_feature 1..27: note = Description of Artificial Sequence: Syntheticoligonucleotide
  source 1..27: mol_type = other RNA
gaatcacagttatgccaaataaaaaaa

SEQ ID NO: 600 - RNA, 27 nt, synthetic construct
  misc_feature 1..27: note = Description of Artificial Sequence: Syntheticoligonucleotide
  source 1..27: mol_type = other RNA
gaatcacagttatgccaaataaaaaaa

SEQ ID NO: 601 - RNA, 27 nt, synthetic construct
  misc_feature 1..27: note = Description of Artificial Sequence: Syntheticoligonucleotide
  source 1..27: mol_type = other RNA
attgtcctaaaagaatcacagttatgc

SEQ ID NO: 602 - RNA, 27 nt, synthetic construct
  misc_feature 1..27: note = Description of Artificial Sequence: Syntheticoligonucleotide
  source 1..27: mol_type = other RNA
cagtaattgtcctaaaagaatcacagt

SEQ ID NO: 603 - RNA, 27 nt, synthetic construct
  misc_feature 1..27: note = Description of Artificial Sequence: Syntheticoligonucleotide
  source 1..27: mol_type = other RNA
acagtaattgtcctaaaagaatcacag

SEQ ID NO: 604 - RNA, 27 nt, synthetic construct
  misc_feature 1..27: note = Description of Artificial Sequence: Syntheticoligonucleotide
  source 1..27: mol_type = other RNA
ggtcaatatgaatatctgacatacacc

SEQ ID NO: 605 - RNA, 27 nt, synthetic construct
  misc_feature 1..27: note = Description of Artificial Sequence: Syntheticoligonucleotide
  source 1..27: mol_type = other RNA
gggtcaatatgaatatctgacatacac

SEQ ID NO: 606 - RNA, 27 nt, synthetic construct
  misc_feature 1..27: note = Description of Artificial Sequence: Syntheticoligonucleotide
  source 1..27: mol_type = other RNA
agagaaaactggaatattacacatttg

SEQ ID NO: 607 - RNA, 27 nt, synthetic construct
  misc_feature 1..27: note = Description of Artificial Sequence: Syntheticoligonucleotide
  source 1..27: mol_type = other RNA
tttttaagtatattttaattacttatg

SEQ ID NO: 608 - RNA, 27 nt, synthetic construct
  misc_feature 1..27: note = Description of Artificial Sequence: Syntheticoligonucleotide
  source 1..27: mol_type = other RNA
atttttaagtatattttaattacttat

SEQ ID NO: 609 - RNA, 27 nt, synthetic construct
  misc_feature 1..27: note = Description of Artificial Sequence: Syntheticoligonucleotide
  source 1..27: mol_type = other RNA
aatttttaagtatattttaattactta

SEQ ID NO: 610 - RNA, 27 nt, synthetic construct
  misc_feature 1..27: note = Description of Artificial Sequence: Syntheticoligonucleotide
  source 1..27: mol_type = other RNA
taatttttaagtatattttaattactt

SEQ ID NO: 611 - RNA, 27 nt, synthetic construct
  misc_feature 1..27: note = Description of Artificial Sequence: Syntheticoligonucleotide
  source 1..27: mol_type = other RNA
ttaatttttaagtatattttaattact

SEQ ID NO: 612 - RNA, 27 nt, synthetic construct
  misc_feature 1..27: note = Description of Artificial Sequence: Syntheticoligonucleotide
  source 1..27: mol_type = other RNA
attaatttttaagtatattttaattac

SEQ ID NO: 613 - RNA, 27 nt, synthetic construct
  misc_feature 1..27: note = Description of Artificial Sequence: Syntheticoligonucleotide
  source 1..27: mol_type = other RNA
tattaatttttaagtatattttaatta

SEQ ID NO: 614 - RNA, 27 nt, synthetic construct
  misc_feature 1..27: note = Description of Artificial Sequence: Syntheticoligonucleotide
  source 1..27: mol_type = other RNA
ctattaatttttaagtatattttaatt

SEQ ID NO: 615 - RNA, 27 nt, synthetic construct
  misc_feature 1..27: note = Description of Artificial Sequence: Syntheticoligonucleotide
  source 1..27: mol_type = other RNA
actattaatttttaagtatattttaat

SEQ ID NO: 616 - RNA, 27 nt, synthetic construct
  misc_feature 1..27: note = Description of Artificial Sequence: Syntheticoligonucleotide
  source 1..27: mol_type = other RNA
aaactattaatttttaagtatatttta

SEQ ID NO: 617 - RNA, 27 nt, synthetic construct
  misc_feature 1..27: note = Description of Artificial Sequence: Syntheticoligonucleotide
  source 1..27: mol_type = other RNA
aaaactattaatttttaagtatatttt

SEQ ID NO: 618 - RNA, 27 nt, synthetic construct
  misc_feature 1..27: note = Description of Artificial Sequence: Syntheticoligonucleotide
  source 1..27: mol_type = other RNA
taaaactattaatttttaagtatattt

SEQ ID NO: 619 - RNA, 27 nt, synthetic construct
  misc_feature 1..27: note = Description of Artificial Sequence: Syntheticoligonucleotide
  source 1..27: mol_type = other RNA
ataaaactattaatttttaagtatatt

SEQ ID NO: 620 - RNA, 27 nt, synthetic construct
  misc_feature 1..27: note = Description of Artificial Sequence: Syntheticoligonucleotide
  source 1..27: mol_type = other RNA
ccagataaaactattaatttttaagta

SEQ ID NO: 621 - RNA, 27 nt, synthetic construct
  misc_feature 1..27: note = Description of Artificial Sequence: Syntheticoligonucleotide
  source 1..27: mol_type = other RNA
gtacccagataaaactattaattttta

SEQ ID NO: 622 - RNA, 27 nt, synthetic construct
  misc_feature 1..27: note = Description of Artificial Sequence: Syntheticoligonucleotide
  source 1..27: mol_type = other RNA
tgtacccagataaaactattaattttt

SEQ ID NO: 623 - RNA, 27 nt, synthetic construct
  misc_feature 1..27: note = Description of Artificial Sequence: Syntheticoligonucleotide
  source 1..27: mol_type = other RNA
ttgtacccagataaaactattaatttt

SEQ ID NO: 624 - RNA, 27 nt, synthetic construct
  misc_feature 1..27: note = Description of Artificial Sequence: Syntheticoligonucleotide
  source 1..27: mol_type = other RNA
caggcacctgtttatttgtacccagat

SEQ ID NO: 625 - RNA, 27 nt, synthetic construct
  misc_feature 1..27: note = Description of Artificial Sequence: Syntheticoligonucleotide
  source 1..27: mol_type = other RNA
tgatttttacatagaagtttccttgtc

SEQ ID NO: 626 - RNA, 27 nt, synthetic construct
  misc_feature 1..27: note = Description of Artificial Sequence: Syntheticoligonucleotide
  source 1..27: mol_type = other RNA
gtgatttttacatagaagtttccttgt

SEQ ID NO: 627 - RNA, 27 nt, synthetic construct
  misc_feature 1..27: note = Description of Artificial Sequence: Syntheticoligonucleotide
  source 1..27: mol_type = other RNA
agtgatttttacatagaagtttccttg

SEQ ID NO: 628 - RNA, 27 nt, synthetic construct
  misc_feature 1..27: note = Description of Artificial Sequence: Syntheticoligonucleotide
  source 1..27: mol_type = other RNA
agaaatcatagtgatttttacatagaa

SEQ ID NO: 629 - RNA, 27 nt, synthetic construct
  misc_feature 1..27: note = Description of Artificial Sequence: Syntheticoligonucleotide
  source 1..27: mol_type = other RNA
cagaaatcatagtgatttttacataga

SEQ ID NO: 630 - RNA, 27 nt, synthetic construct
  misc_feature 1..27: note = Description of Artificial Sequence: Syntheticoligonucleotide
  source 1..27: mol_type = other RNA
tcagaaatcatagtgatttttacatag

SEQ ID NO: 631 - RNA, 27 nt, synthetic construct
  misc_feature 1..27: note = Description of Artificial Sequence: Syntheticoligonucleotide
  source 1..27: mol_type = other RNA
caattcagaaatcatagtgatttttac

SEQ ID NO: 632 - RNA, 27 nt, synthetic construct
  misc_feature 1..27: note = Description of Artificial Sequence: Syntheticoligonucleotide
  source 1..27: mol_type = other RNA
gcaattcagaaatcatagtgattttta

SEQ ID NO: 633 - RNA, 27 nt, synthetic construct
  misc_feature 1..27: note = Description of Artificial Sequence: Syntheticoligonucleotide
  source 1..27: mol_type = other RNA
tttcacatagcaattcagaaatcatag

SEQ ID NO: 634 - RNA, 27 nt, synthetic construct
  misc_feature 1..27: note = Description of Artificial Sequence: Syntheticoligonucleotide
  source 1..27: mol_type = other RNA
gtttcacatagcaattcagaaatcata

SEQ ID NO: 635 - RNA, 27 nt, synthetic construct
  misc_feature 1..27: note = Description of Artificial Sequence: Syntheticoligonucleotide
  source 1..27: mol_type = other RNA
tgttccaaagatctgtagtttcacata

SEQ ID NO: 636 - RNA, 27 nt, synthetic construct
  misc_feature 1..27: note = Description of Artificial Sequence: Syntheticoligonucleotide
  source 1..27: mol_type = other RNA
gtgttccaaagatctgtagtttcacat

SEQ ID NO: 637 - RNA, 27 nt, synthetic construct
  misc_feature 1..27: note = Description of Artificial Sequence: Syntheticoligonucleotide
  source 1..27: mol_type = other RNA
gaggtactgtgtaagtcttaacaccct

SEQ ID NO: 638 - RNA, 27 nt, synthetic construct
  misc_feature 1..27: note = Description of Artificial Sequence: Syntheticoligonucleotide
  source 1..27: mol_type = other RNA
ctacatcaaaaattcaagaggcctaaa

SEQ ID NO: 639 - RNA, 27 nt, synthetic construct
  misc_feature 1..27: note = Description of Artificial Sequence: Syntheticoligonucleotide
  source 1..27: mol_type = other RNA
atgcccatctacatcaaaaattcaaga

SEQ ID NO: 640 - RNA, 27 nt, synthetic construct
  misc_feature 1..27: note = Description of Artificial Sequence: Syntheticoligonucleotide
  source 1..27: mol_type = other RNA
aatgcccatctacatcaaaaattcaag

SEQ ID NO: 641 - RNA, 27 nt, synthetic construct
  misc_feature 1..27: note = Description of Artificial Sequence: Syntheticoligonucleotide
  source 1..27: mol_type = other RNA
ccactaccttaaaaaaatgcccatcta

SEQ ID NO: 642 - RNA, 27 nt, synthetic construct
  misc_feature 1..27: note = Description of Artificial Sequence: Syntheticoligonucleotide
  source 1..27: mol_type = other RNA
aattaaccactaccttaaaaaaatgcc

SEQ ID NO: 643 - RNA, 27 nt, synthetic construct
  misc_feature 1..27: note = Description of Artificial Sequence: Syntheticoligonucleotide
  source 1..27: mol_type = other RNA
tcacataaaggtaattaaccactacct

SEQ ID NO: 644 - RNA, 27 nt, synthetic construct
  misc_feature 1..27: note = Description of Artificial Sequence: Syntheticoligonucleotide
  source 1..27: mol_type = other RNA
gttcacataaaggtaattaaccactac

SEQ ID NO: 645 - RNA, 27 nt, synthetic construct
  misc_feature 1..27: note = Description of Artificial Sequence: Syntheticoligonucleotide
  source 1..27: mol_type = other RNA
agttcacataaaggtaattaaccacta

SEQ ID NO: 646 - RNA, 27 nt, synthetic construct
  misc_feature 1..27: note = Description of Artificial Sequence: Syntheticoligonucleotide
  source 1..27: mol_type = other RNA
aagttcacataaaggtaattaaccact

SEQ ID NO: 647 - RNA, 27 nt, synthetic construct
  misc_feature 1..27: note = Description of Artificial Sequence: Syntheticoligonucleotide
  source 1..27: mol_type = other RNA
aaagttcacataaaggtaattaaccac

SEQ ID NO: 648 - RNA, 27 nt, synthetic construct
  misc_feature 1..27: note = Description of Artificial Sequence: Syntheticoligonucleotide
  source 1..27: mol_type = other RNA
taaaccattcaaagttcacataaaggt

SEQ ID NO: 649 - RNA, 27 nt, synthetic construct
  misc_feature 1..27: note = Description of Artificial Sequence: Syntheticoligonucleotide
  source 1..27: mol_type = other RNA
tttgttaaaccattcaaagttcacata

SEQ ID NO: 650 - RNA, 27 nt, synthetic construct
  misc_feature 1..27: note = Description of Artificial Sequence: Syntheticoligonucleotide
  source 1..27: mol_type = other RNA
aaatcttttgttaaaccattcaaagtt

SEQ ID NO: 651 - RNA, 27 nt, synthetic construct
  misc_feature 1..27: note = Description of Artificial Sequence: Syntheticoligonucleotide
  source 1..27: mol_type = other RNA
aaacaaatcttttgttaaaccattcaa

SEQ ID NO: 652 - RNA, 27 nt, synthetic construct
  misc_feature 1..27: note = Description of Artificial Sequence: Syntheticoligonucleotide
  source 1..27: mol_type = other RNA
aaaacaaatcttttgttaaaccattca

SEQ ID NO: 653 - RNA, 27 nt, synthetic construct
  misc_feature 1..27: note = Description of Artificial Sequence: Syntheticoligonucleotide
  source 1..27: mol_type = other RNA
aaaaacaaatcttttgttaaaccattc

SEQ ID NO: 654 - RNA, 27 nt, synthetic construct
  misc_feature 1..27: note = Description of Artificial Sequence: Syntheticoligonucleotide
  source 1..27: mol_type = other RNA
caaaaacaaatcttttgttaaaccatt

SEQ ID NO: 655 - RNA, 27 nt, synthetic construct
  misc_feature 1..27: note = Description of Artificial Sequence: Syntheticoligonucleotide
  source 1..27: mol_type = other RNA
acaaaaacaaatcttttgttaaaccat

SEQ ID NO: 656 - RNA, 27 nt, synthetic construct
  misc_feature 1..27: note = Description of Artificial Sequence: Syntheticoligonucleotide
  source 1..27: mol_type = other RNA
ctacaaaaacaaatcttttgttaaacc

SEQ ID NO: 657 - RNA, 27 nt, synthetic construct
  misc_feature 1..27: note = Description of Artificial Sequence: Syntheticoligonucleotide
  source 1..27: mol_type = other RNA
tctacaaaaacaaatcttttgttaaac

SEQ ID NO: 658 - RNA, 27 nt, synthetic construct
  misc_feature 1..27: note = Description of Artificial Sequence: Syntheticoligonucleotide
  source 1..27: mol_type = other RNA
aatctctacaaaaacaaatcttttgtt

SEQ ID NO: 659 - RNA, 27 nt, synthetic construct
  misc_feature 1..27: note = Description of Artificial Sequence: Syntheticoligonucleotide
  source 1..27: mol_type = other RNA
aaatctctacaaaaacaaatcttttgt

SEQ ID NO: 660 - RNA, 27 nt, synthetic construct
  misc_feature 1..27: note = Description of Artificial Sequence: Syntheticoligonucleotide
  source 1..27: mol_type = other RNA
aaaatctctacaaaaacaaatcttttg

SEQ ID NO: 661 - RNA, 27 nt, synthetic construct
  misc_feature 1..27: note = Description of Artificial Sequence: Syntheticoligonucleotide
  source 1..27: mol_type = other RNA
ttaaaatctctacaaaaacaaatcttt

SEQ ID NO: 662 - RNA, 27 nt, synthetic construct
  misc_feature 1..27: note = Description of Artificial Sequence: Syntheticoligonucleotide
  source 1..27: mol_type = other RNA
tttaaaatctctacaaaaacaaatctt

SEQ ID NO: 663 - RNA, 27 nt, synthetic construct
  misc_feature 1..27: note = Description of Artificial Sequence: Syntheticoligonucleotide
  source 1..27: mol_type = other RNA
ctttaaaatctctacaaaaacaaatct

SEQ ID NO: 664 - RNA, 27 nt, synthetic construct
  misc_feature 1..27: note = Description of Artificial Sequence: Syntheticoligonucleotide
  source 1..27: mol_type = other RNA
cctttaaaatctctacaaaaacaaatc

SEQ ID NO: 665 - RNA, 27 nt, synthetic construct
  misc_feature 1..27: note = Description of Artificial Sequence: Syntheticoligonucleotide
  source 1..27: mol_type = other RNA
tctccccctttaaaatctctacaaaaa

SEQ ID NO: 666 - RNA, 27 nt, synthetic construct
  misc_feature 1..27: note = Description of Artificial Sequence: Syntheticoligonucleotide
  source 1..27: mol_type = other RNA
acatttatttctagaattctccccctt

SEQ ID NO: 667 - RNA, 27 nt, synthetic construct
  misc_feature 1..27: note = Description of Artificial Sequence: Syntheticoligonucleotide
  source 1..27: mol_type = other RNA
taacatttatttctagaattctccccc

SEQ ID NO: 668 - RNA, 27 nt, synthetic construct
  misc_feature 1..27: note = Description of Artificial Sequence: Syntheticoligonucleotide
  source 1..27: mol_type = other RNA
gtaacatttatttctagaattctcccc

SEQ ID NO: 669 - RNA, 27 nt, synthetic construct
  misc_feature 1..27: note = Description of Artificial Sequence: Syntheticoligonucleotide
  source 1..27: mol_type = other RNA
ggtaacatttatttctagaattctccc

SEQ ID NO: 670 - RNA, 27 nt, synthetic construct
  misc_feature 1..27: note = Description of Artificial Sequence: Syntheticoligonucleotide
  source 1..27: mol_type = other RNA
aggtaacatttatttctagaattctcc

SEQ ID NO: 671 - RNA, 27 nt, synthetic construct
  misc_feature 1..27: note = Description of Artificial Sequence: Syntheticoligonucleotide
  source 1..27: mol_type = other RNA
taggtaacatttatttctagaattctc

SEQ ID NO: 672 - RNA, 27 nt, synthetic construct
  misc_feature 1..27: note = Description of Artificial Sequence: Syntheticoligonucleotide
  source 1..27: mol_type = other RNA
ataattaggtaacatttatttctagaa

SEQ ID NO: 673 - RNA, 27 nt, synthetic construct
  misc_feature 1..27: note = Description of Artificial Sequence: Syntheticoligonucleotide
  source 1..27: mol_type = other RNA
aataattaggtaacatttatttctaga

SEQ ID NO: 674 - RNA, 27 nt, synthetic construct
  misc_feature 1..27: note = Description of Artificial Sequence: Syntheticoligonucleotide
  source 1..27: mol_type = other RNA
taataattaggtaacatttatttctag

SEQ ID NO: 675 - RNA, 27 nt, synthetic construct
  misc_feature 1..27: note = Description of Artificial Sequence: Syntheticoligonucleotide
  source 1..27: mol_type = other RNA
gtaataattaggtaacatttatttcta

SEQ ID NO: 676 - RNA, 27 nt, synthetic construct
  misc_feature 1..27: note = Description of Artificial Sequence: Syntheticoligonucleotide
  source 1..27: mol_type = other RNA
tgtaataattaggtaacatttatttct

SEQ ID NO: 677 - RNA, 27 nt, synthetic construct
  misc_feature 1..27: note = Description of Artificial Sequence: Syntheticoligonucleotide
  source 1..27: mol_type = other RNA
gctgtaataattaggtaacatttattt

SEQ ID NO: 678 - RNA, 27 nt, synthetic construct
  misc_feature 1..27: note = Description of Artificial Sequence: Syntheticoligonucleotide
  source 1..27: mol_type = other RNA
ttgtctttaaggctgtaataattaggt

SEQ ID NO: 679 - RNA, 27 nt, synthetic construct
  misc_feature 1..27: note = Description of Artificial Sequence: Syntheticoligonucleotide
  source 1..27: mol_type = other RNA
tttgtctttaaggctgtaataattagg

SEQ ID NO: 680 - RNA, 27 nt, synthetic construct
  misc_feature 1..27: note = Description of Artificial Sequence: Syntheticoligonucleotide
  source 1..27: mol_type = other RNA
cttcaacaaggatttttgtctttaagg

SEQ ID NO: 681 - RNA, 27 nt, synthetic construct
  misc_feature 1..27: note = Description of Artificial Sequence: Syntheticoligonucleotide
  source 1..27: mol_type = other RNA
aaacttcaacaaggatttttgtcttta

SEQ ID NO: 682 - RNA, 27 nt, synthetic construct
  misc_feature 1..27: note = Description of Artificial Sequence: Syntheticoligonucleotide
  source 1..27: mol_type = other RNA
ctttttttaaaaaaacttcaacaagga

SEQ ID NO: 683 - RNA, 27 nt, synthetic construct
  misc_feature 1..27: note = Description of Artificial Sequence: Syntheticoligonucleotide
  source 1..27: mol_type = other RNA
gctttttttaaaaaaacttcaacaagg

SEQ ID NO: 684 - RNA, 27 nt, synthetic construct
  misc_feature 1..27: note = Description of Artificial Sequence: Syntheticoligonucleotide
  source 1..27: mol_type = other RNA
tagctttttttaaaaaaacttcaacaa

SEQ ID NO: 685 - RNA, 27 nt, synthetic construct
  misc_feature 1..27: note = Description of Artificial Sequence: Syntheticoligonucleotide
  source 1..27: mol_type = other RNA
ttagctttttttaaaaaaacttcaaca

SEQ ID NO: 686 - RNA, 27 nt, synthetic construct
  misc_feature 1..27: note = Description of Artificial Sequence: Syntheticoligonucleotide
  source 1..27: mol_type = other RNA
taatttagctttttttaaaaaaacttc

SEQ ID NO: 687 - RNA, 27 nt, synthetic construct
  misc_feature 1..27: note = Description of Artificial Sequence: Syntheticoligonucleotide
  source 1..27: mol_type = other RNA
gtaatttagctttttttaaaaaaactt

SEQ ID NO: 688 - RNA, 27 nt, synthetic construct
  misc_feature 1..27: note = Description of Artificial Sequence: Syntheticoligonucleotide
  source 1..27: mol_type = other RNA
tgtaatttagctttttttaaaaaaact

SEQ ID NO: 689 - RNA, 27 nt, synthetic construct
  misc_feature 1..27: note = Description of Artificial Sequence: Syntheticoligonucleotide
  source 1..27: mol_type = other RNA
atgtaatttagctttttttaaaaaaac

SEQ ID NO: 690 - RNA, 27 nt, synthetic construct
  misc_feature 1..27: note = Description of Artificial Sequence: Syntheticoligonucleotide
  source 1..27: mol_type = other RNA
tatgtaatttagctttttttaaaaaaa

SEQ ID NO: 691 - RNA, 27 nt, synthetic construct
  misc_feature 1..27: note = Description of Artificial Sequence: Syntheticoligonucleotide
  source 1..27: mol_type = other RNA
agtctatgtaatttagctttttttaaa

SEQ ID NO: 692 - RNA, 27 nt, synthetic construct
  misc_feature 1..27: note = Description of Artificial Sequence: Syntheticoligonucleotide
  source 1..27: mol_type = other RNA
taagtctatgtaatttagcttttttta

SEQ ID NO: 693 - RNA, 27 nt, synthetic construct
  misc_feature 1..27: note = Description of Artificial Sequence: Syntheticoligonucleotide
  source 1..27: mol_type = other RNA
cttccacaaacatgttaatgcctaagt

SEQ ID NO: 694 - RNA, 27 nt, synthetic construct
  misc_feature 1..27: note = Description of Artificial Sequence: Syntheticoligonucleotide
  source 1..27: mol_type = other RNA
tcttccacaaacatgttaatgcctaag

SEQ ID NO: 695 - RNA, 27 nt, synthetic construct
  misc_feature 1..27: note = Description of Artificial Sequence: Syntheticoligonucleotide
  source 1..27: mol_type = other RNA
actcaaatgatacaatatacgtctgct

SEQ ID NO: 696 - RNA, 27 nt, synthetic construct
  misc_feature 1..27: note = Description of Artificial Sequence: Syntheticoligonucleotide
  source 1..27: mol_type = other RNA
attcactcaaatgatacaatatacgtc

SEQ ID NO: 697 - RNA, 27 nt, synthetic construct
  misc_feature 1..27: note = Description of Artificial Sequence: Syntheticoligonucleotide
  source 1..27: mol_type = other RNA
acattcactcaaatgatacaatatacg

SEQ ID NO: 698 - RNA, 27 nt, synthetic construct
  misc_feature 1..27: note = Description of Artificial Sequence: Syntheticoligonucleotide
  source 1..27: mol_type = other RNA
ggaacattcactcaaatgatacaatat

SEQ ID NO: 699 - RNA, 27 nt, synthetic construct
  misc_feature 1..27: note = Description of Artificial Sequence: Syntheticoligonucleotide
  source 1..27: mol_type = other RNA
gggaacattcactcaaatgatacaata

SEQ ID NO: 700 - RNA, 27 nt, synthetic construct
  misc_feature 1..27: note = Description of Artificial Sequence: Syntheticoligonucleotide
  source 1..27: mol_type = other RNA
tgggaacattcactcaaatgatacaat

SEQ ID NO: 701 - RNA, 27 nt, synthetic construct
  misc_feature 1..27: note = Description of Artificial Sequence: Syntheticoligonucleotide
  source 1..27: mol_type = other RNA
tataaaagttaggttctaaattcctat

SEQ ID NO: 702 - RNA, 27 nt, synthetic construct
  misc_feature 1..27: note = Description of Artificial Sequence: Syntheticoligonucleotide
  source 1..27: mol_type = other RNA
ctataaaagttaggttctaaattccta

SEQ ID NO: 703 - RNA, 27 nt, synthetic construct
  misc_feature 1..27: note = Description of Artificial Sequence: Syntheticoligonucleotide
  source 1..27: mol_type = other RNA
taacctataaaagttaggttctaaatt

SEQ ID NO: 704 - RNA, 27 nt, synthetic construct
  misc_feature 1..27: note = Description of Artificial Sequence: Syntheticoligonucleotide
  source 1..27: mol_type = other RNA
ataacctataaaagttaggttctaaat

SEQ ID NO: 705 - RNA, 27 nt, synthetic construct
  misc_feature 1..27: note = Description of Artificial Sequence: Syntheticoligonucleotide
  source 1..27: mol_type = other RNA
gataacctataaaagttaggttctaaa

SEQ ID NO: 706 - RNA, 27 nt, synthetic construct
  misc_feature 1..27: note = Description of Artificial Sequence: Syntheticoligonucleotide
  source 1..27: mol_type = other RNA
tgataacctataaaagttaggttctaa

SEQ ID NO: 707 - RNA, 27 nt, synthetic construct
  misc_feature 1..27: note = Description of Artificial Sequence: Syntheticoligonucleotide
  source 1..27: mol_type = other RNA
tgacaacagttttgataacctataaaa

SEQ ID NO: 708 - RNA, 27 nt, synthetic construct
  misc_feature 1..27: note = Description of Artificial Sequence: Syntheticoligonucleotide
  source 1..27: mol_type = other RNA
ggtgacaacagttttgataacctataa

SEQ ID NO: 709 - RNA, 27 nt, synthetic construct
  misc_feature 1..27: note = Description of Artificial Sequence: Syntheticoligonucleotide
  source 1..27: mol_type = other RNA
tttctatgtatatattaggacaaaatt

SEQ ID NO: 710 - RNA, 27 nt, synthetic construct
  misc_feature 1..27: note = Description of Artificial Sequence: Syntheticoligonucleotide
  source 1..27: mol_type = other RNA
gtttctatgtatatattaggacaaaat

SEQ ID NO: 711 - RNA, 27 nt, synthetic construct
  misc_feature 1..27: note = Description of Artificial Sequence: Syntheticoligonucleotide
  source 1..27: mol_type = other RNA
agtttctatgtatatattaggacaaaa

SEQ ID NO: 712 - RNA, 27 nt, synthetic construct
  misc_feature 1..27: note = Description of Artificial Sequence: Syntheticoligonucleotide
  source 1..27: mol_type = other RNA
ccacaaagtttctatgtatatattagg

SEQ ID NO: 713 - RNA, 27 nt, synthetic construct
  misc_feature 1..27: note = Description of Artificial Sequence: Syntheticoligonucleotide
  source 1..27: mol_type = other RNA
atgccccacaaagtttctatgtatata

SEQ ID NO: 714 - RNA, 27 nt, synthetic construct
  misc_feature 1..27: note = Description of Artificial Sequence: Syntheticoligonucleotide
  source 1..27: mol_type = other RNA
atggaatacaaatgagatgaacttgtg

SEQ ID NO: 715 - RNA, 27 nt, synthetic construct
  misc_feature 1..27: note = Description of Artificial Sequence: Syntheticoligonucleotide
  source 1..27: mol_type = other RNA
aaaaaaaatcaatggaatacaaatgag

SEQ ID NO: 716 - RNA, 27 nt, synthetic construct
  misc_feature 1..27: note = Description of Artificial Sequence: Syntheticoligonucleotide
  source 1..27: mol_type = other RNA
aaaaaaaaatcaatggaatacaaatga

SEQ ID NO: 717 - RNA, 27 nt, synthetic construct
  misc_feature 1..27: note = Description of Artificial Sequence: Syntheticoligonucleotide
  source 1..27: mol_type = other RNA
aaaaaaaaaatcaatggaatacaaatg

SEQ ID NO: 718 - RNA, 27 nt, synthetic construct
  misc_feature 1..27: note = Description of Artificial Sequence: Syntheticoligonucleotide
  source 1..27: mol_type = other RNA
gaaaaaaaaaatcaatggaatacaaat

SEQ ID NO: 719 - RNA, 27 nt, synthetic construct
  misc_feature 1..27: note = Description of Artificial Sequence: Syntheticoligonucleotide
  source 1..27: mol_type = other RNA
agaaaaaaaaaatcaatggaatacaaa

SEQ ID NO: 720 - RNA, 27 nt, synthetic construct
  misc_feature 1..27: note = Description of Artificial Sequence: Syntheticoligonucleotide
  source 1..27: mol_type = other RNA
aagaaaaaaaaaatcaatggaatacaa

SEQ ID NO: 721 - RNA, 27 nt, synthetic construct
  misc_feature 1..27: note = Description of Artificial Sequence: Syntheticoligonucleotide
  source 1..27: mol_type = other RNA
gaagaaaaaaaaaatcaatggaataca

SEQ ID NO: 722 - RNA, 27 nt, synthetic construct
  misc_feature 1..27: note = Description of Artificial Sequence: Syntheticoligonucleotide
  source 1..27: mol_type = other RNA
atgtttagaagaaaaaaaaaatcaatg

SEQ ID NO: 723 - RNA, 27 nt, synthetic construct
  misc_feature 1..27: note = Description of Artificial Sequence: Syntheticoligonucleotide
  source 1..27: mol_type = other RNA
aatgtttagaagaaaaaaaaaatcaat

SEQ ID NO: 724 - RNA, 27 nt, synthetic construct
  misc_feature 1..27: note = Description of Artificial Sequence: Syntheticoligonucleotide
  source 1..27: mol_type = other RNA
aaaaaatgtttagaagaaaaaaaaaat

SEQ ID NO: 725 - RNA, 27 nt, synthetic construct
  misc_feature 1..27: note = Description of Artificial Sequence: Syntheticoligonucleotide
  source 1..27: mol_type = other RNA
gaaaaaatgtttagaagaaaaaaaaaa

SEQ ID NO: 726 - RNA, 27 nt, synthetic construct
  misc_feature 1..27: note = Description of Artificial Sequence: Syntheticoligonucleotide
  source 1..27: mol_type = other RNA
agaaaaaatgtttagaagaaaaaaaaa

SEQ ID NO: 727 - RNA, 27 nt, synthetic construct
  misc_feature 1..27: note = Description of Artificial Sequence: Syntheticoligonucleotide
  source 1..27: mol_type = other RNA
aagaaaaaatgtttagaagaaaaaaaa

SEQ ID NO: 728 - RNA, 27 nt, synthetic construct
  misc_feature 1..27: note = Description of Artificial Sequence: Syntheticoligonucleotide
  source 1..27: mol_type = other RNA
gaagaaaaaatgtttagaagaaaaaaa

SEQ ID NO: 729 - RNA, 27 nt, synthetic construct
  misc_feature 1..27: note = Description of Artificial Sequence: Syntheticoligonucleotide
  source 1..27: mol_type = other RNA
ttatatactgtttgaagaaaaaatgtt

SEQ ID NO: 730 - RNA, 27 nt, synthetic construct
  misc_feature 1..27: note = Description of Artificial Sequence: Syntheticoligonucleotide
  source 1..27: mol_type = other RNA
gttatatactgtttgaagaaaaaatgt

SEQ ID NO: 731 - RNA, 27 nt, synthetic construct
  misc_feature 1..27: note = Description of Artificial Sequence: Syntheticoligonucleotide
  source 1..27: mol_type = other RNA
agttatatactgtttgaagaaaaaatg

SEQ ID NO: 732 - RNA, 27 nt, synthetic construct
  misc_feature 1..27: note = Description of Artificial Sequence: Syntheticoligonucleotide
  source 1..27: mol_type = other RNA
aagttatatactgtttgaagaaaaaat

SEQ ID NO: 733 - RNA, 27 nt, synthetic construct
  misc_feature 1..27: note = Description of Artificial Sequence: Syntheticoligonucleotide
  source 1..27: mol_type = other RNA
aaagttatatactgtttgaagaaaaaa

SEQ ID NO: 734 - RNA, 27 nt, synthetic construct
  misc_feature 1..27: note = Description of Artificial Sequence: Syntheticoligonucleotide
  source 1..27: mol_type = other RNA
cctaaaaaaagttatatactgtttgaa

SEQ ID NO: 735 - RNA, 27 nt, synthetic construct
  misc_feature 1..27: note = Description of Artificial Sequence: Syntheticoligonucleotide
  source 1..27: mol_type = other RNA
aatcccctaaaaaaagttatatactgt

SEQ ID NO: 736 - RNA, 27 nt, synthetic construct
  misc_feature 1..27: note = Description of Artificial Sequence: Syntheticoligonucleotide
  source 1..27: mol_type = other RNA
aaatcccctaaaaaaagttatatactg

SEQ ID NO: 737 - RNA, 27 nt, synthetic construct
  misc_feature 1..27: note = Description of Artificial Sequence: Syntheticoligonucleotide
  source 1..27: mol_type = other RNA
aaaatcccctaaaaaaagttatatact

SEQ ID NO: 738 - RNA, 27 nt, synthetic construct
  misc_feature 1..27: note = Description of Artificial Sequence: Syntheticoligonucleotide
  source 1..27: mol_type = other RNA
aaaaatcccctaaaaaaagttatatac

SEQ ID NO: 739 - RNA, 27 nt, synthetic construct
  misc_feature 1..27: note = Description of Artificial Sequence: Syntheticoligonucleotide
  source 1..27: mol_type = other RNA
ctaaaaaaaaatcccctaaaaaaagtt

SEQ ID NO: 740 - RNA, 27 nt, synthetic construct
  misc_feature 1..27: note = Description of Artificial Sequence: Syntheticoligonucleotide
  source 1..27: mol_type = other RNA
tctaaaaaaaaatcccctaaaaaaagt

SEQ ID NO: 741 - RNA, 27 nt, synthetic construct
  misc_feature 1..27: note = Description of Artificial Sequence: Syntheticoligonucleotide
  source 1..27: mol_type = other RNA
agtttttgctgtctaaaaaaaaatccc

SEQ ID NO: 742 - RNA, 27 nt, synthetic construct
  misc_feature 1..27: note = Description of Artificial Sequence: Syntheticoligonucleotide
  source 1..27: mol_type = other RNA
tagtttttgctgtctaaaaaaaaatcc

SEQ ID NO: 743 - RNA, 27 nt, synthetic construct
  misc_feature 1..27: note = Description of Artificial Sequence: Syntheticoligonucleotide
  source 1..27: mol_type = other RNA
atagtttttgctgtctaaaaaaaaatc

SEQ ID NO: 744 - RNA, 27 nt, synthetic construct
  misc_feature 1..27: note = Description of Artificial Sequence: Syntheticoligonucleotide
  source 1..27: mol_type = other RNA
ttactttttgacaaatggaaatcttca

SEQ ID NO: 745 - RNA, 27 nt, synthetic construct
  misc_feature 1..27: note = Description of Artificial Sequence: Syntheticoligonucleotide
  source 1..27: mol_type = other RNA
attactttttgacaaatggaaatcttc

SEQ ID NO: 746 - RNA, 27 nt, synthetic construct
  misc_feature 1..27: note = Description of Artificial Sequence: Syntheticoligonucleotide
  source 1..27: mol_type = other RNA
cattactttttgacaaatggaaatctt

SEQ ID NO: 747 - RNA, 27 nt, synthetic construct
  misc_feature 1..27: note = Description of Artificial Sequence: Syntheticoligonucleotide
  source 1..27: mol_type = other RNA
tcattactttttgacaaatggaaatct

SEQ ID NO: 748 - RNA, 27 nt, synthetic construct
  misc_feature 1..27: note = Description of Artificial Sequence: Syntheticoligonucleotide
  source 1..27: mol_type = other RNA
agaaatcattactttttgacaaatgga

SEQ ID NO: 749 - RNA, 27 nt, synthetic construct
  misc_feature 1..27: note = Description of Artificial Sequence: Syntheticoligonucleotide
  source 1..27: mol_type = other RNA
aagaaatcattactttttgacaaatgg

SEQ ID NO: 750 - RNA, 27 nt, synthetic construct
  misc_feature 1..27: note = Description of Artificial Sequence: Syntheticoligonucleotide
  source 1..27: mol_type = other RNA
caagaaatcattactttttgacaaatg

SEQ ID NO: 751 - RNA, 27 nt, synthetic construct
  misc_feature 1..27: note = Description of Artificial Sequence: Syntheticoligonucleotide
  source 1..27: mol_type = other RNA
attatcaagaaatcattactttttgac

SEQ ID NO: 752 - RNA, 27 nt, synthetic construct
  misc_feature 1..27: note = Description of Artificial Sequence: Syntheticoligonucleotide
  source 1..27: mol_type = other RNA
aattatcaagaaatcattactttttga

SEQ ID NO: 753 - RNA, 27 nt, synthetic construct
  misc_feature 1..27: note = Description of Artificial Sequence: Syntheticoligonucleotide
  source 1..27: mol_type = other RNA
caattatcaagaaatcattactttttg

SEQ ID NO: 754 - RNA, 27 nt, synthetic construct
  misc_feature 1..27: note = Description of Artificial Sequence: Syntheticoligonucleotide
  source 1..27: mol_type = other RNA
acaattatcaagaaatcattacttttt

SEQ ID NO: 755 - RNA, 27 nt, synthetic construct
  misc_feature 1..27: note = Description of Artificial Sequence: Syntheticoligonucleotide
  source 1..27: mol_type = other RNA
acacaattatcaagaaatcattacttt

SEQ ID NO: 756 - RNA, 27 nt, synthetic construct
  misc_feature 1..27: note = Description of Artificial Sequence: Syntheticoligonucleotide
  source 1..27: mol_type = other RNA
ctacacaattatcaagaaatcattact

SEQ ID NO: 757 - RNA, 27 nt, synthetic construct
  misc_feature 1..27: note = Description of Artificial Sequence: Syntheticoligonucleotide
  source 1..27: mol_type = other RNA
actacacaattatcaagaaatcattac

SEQ ID NO: 758 - RNA, 27 nt, synthetic construct
  misc_feature 1..27: note = Description of Artificial Sequence: Syntheticoligonucleotide
  source 1..27: mol_type = other RNA
ttactacacaattatcaagaaatcatt

SEQ ID NO: 759 - RNA, 27 nt, synthetic construct
  misc_feature 1..27: note = Description of Artificial Sequence: Syntheticoligonucleotide
  source 1..27: mol_type = other RNA
attactacacaattatcaagaaatcat

SEQ ID NO: 760 - RNA, 27 nt, synthetic construct
  misc_feature 1..27: note = Description of Artificial Sequence: Syntheticoligonucleotide
  source 1..27: mol_type = other RNA
aaaacattactacacaattatcaagaa

SEQ ID NO: 761 - RNA, 27 nt, synthetic construct
  misc_feature 1..27: note = Description of Artificial Sequence: Syntheticoligonucleotide
  source 1..27: mol_type = other RNA
aaaaacattactacacaattatcaaga

SEQ ID NO: 762 - RNA, 27 nt, synthetic construct
  misc_feature 1..27: note = Description of Artificial Sequence: Syntheticoligonucleotide
  source 1..27: mol_type = other RNA
aaaaaacattactacacaattatcaag

SEQ ID NO: 763 - RNA, 27 nt, synthetic construct
  misc_feature 1..27: note = Description of Artificial Sequence: Syntheticoligonucleotide
  source 1..27: mol_type = other RNA
ctaaaaaacattactacacaattatca

SEQ ID NO: 764 - RNA, 27 nt, synthetic construct
  misc_feature 1..27: note = Description of Artificial Sequence: Syntheticoligonucleotide
  source 1..27: mol_type = other RNA
gttctaaaaaacattactacacaatta

SEQ ID NO: 765 - RNA, 27 nt, synthetic construct
  misc_feature 1..27: note = Description of Artificial Sequence: Syntheticoligonucleotide
  source 1..27: mol_type = other RNA
gggttctaaaaaacattactacacaat

SEQ ID NO: 766 - RNA, 27 nt, synthetic construct
  misc_feature 1..27: note = Description of Artificial Sequence: Syntheticoligonucleotide
  source 1..27: mol_type = other RNA
tgggttctaaaaaacattactacacaa

SEQ ID NO: 767 - RNA, 27 nt, synthetic construct
  misc_feature 1..27: note = Description of Artificial Sequence: Syntheticoligonucleotide
  source 1..27: mol_type = other RNA
ttactaaatataaattcagctttaagg

SEQ ID NO: 768 - RNA, 27 nt, synthetic construct
  misc_feature 1..27: note = Description of Artificial Sequence: Syntheticoligonucleotide
  source 1..27: mol_type = other RNA
agttactaaatataaattcagctttaa

SEQ ID NO: 769 - RNA, 27 nt, synthetic construct
  misc_feature 1..27: note = Description of Artificial Sequence: Syntheticoligonucleotide
  source 1..27: mol_type = other RNA
taacacagaagttactaaatataaatt

SEQ ID NO: 770 - RNA, 27 nt, synthetic construct
  misc_feature 1..27: note = Description of Artificial Sequence: Syntheticoligonucleotide
  source 1..27: mol_type = other RNA
ttaacacagaagttactaaatataaat

SEQ ID NO: 771 - RNA, 27 nt, synthetic construct
  misc_feature 1..27: note = Description of Artificial Sequence: Syntheticoligonucleotide
  source 1..27: mol_type = other RNA
attaacacagaagttactaaatataaa

SEQ ID NO: 772 - RNA, 27 nt, synthetic construct
  misc_feature 1..27: note = Description of Artificial Sequence: Syntheticoligonucleotide
  source 1..27: mol_type = other RNA
ccagtattaacacagaagttactaaat

SEQ ID NO: 773 - RNA, 27 nt, synthetic construct
  misc_feature 1..27: note = Description of Artificial Sequence: Syntheticoligonucleotide
  source 1..27: mol_type = other RNA
agtttcattttatgacagctattcagt

SEQ ID NO: 774 - RNA, 27 nt, synthetic construct
  misc_feature 1..27: note = Description of Artificial Sequence: Syntheticoligonucleotide
  source 1..27: mol_type = other RNA
aagtttcattttatgacagctattcag

SEQ ID NO: 775 - RNA, 27 nt, synthetic construct
  misc_feature 1..27: note = Description of Artificial Sequence: Syntheticoligonucleotide
  source 1..27: mol_type = other RNA
tttctttagaaagaaagtttcatttta

SEQ ID NO: 776 - RNA, 27 nt, synthetic construct
  misc_feature 1..27: note = Description of Artificial Sequence: Syntheticoligonucleotide
  source 1..27: mol_type = other RNA
ctttctttagaaagaaagtttcatttt

SEQ ID NO: 777 - RNA, 27 nt, synthetic construct
  misc_feature 1..27: note = Description of Artificial Sequence: Syntheticoligonucleotide
  source 1..27: mol_type = other RNA
tctttctttagaaagaaagtttcattt

SEQ ID NO: 778 - RNA, 27 nt, synthetic construct
  misc_feature 1..27: note = Description of Artificial Sequence: Syntheticoligonucleotide
  source 1..27: mol_type = other RNA
tatctttctttagaaagaaagtttcat

SEQ ID NO: 779 - RNA, 27 nt, synthetic construct
  misc_feature 1..27: note = Description of Artificial Sequence: Syntheticoligonucleotide
  source 1..27: mol_type = other RNA
tgagtatctttctttagaaagaaagtt

SEQ ID NO: 780 - RNA, 27 nt, synthetic construct
  misc_feature 1..27: note = Description of Artificial Sequence: Syntheticoligonucleotide
  source 1..27: mol_type = other RNA
tatgactattcttcaagaactcatgtg

SEQ ID NO: 781 - RNA, 27 nt, synthetic construct
  misc_feature 1..27: note = Description of Artificial Sequence: Syntheticoligonucleotide
  source 1..27: mol_type = other RNA
taatctagttatgactattcttcaaga

SEQ ID NO: 782 - RNA, 27 nt, synthetic construct
  misc_feature 1..27: note = Description of Artificial Sequence: Syntheticoligonucleotide
  source 1..27: mol_type = other RNA
ttaatctagttatgactattcttcaag

SEQ ID NO: 783 - RNA, 27 nt, synthetic construct
  misc_feature 1..27: note = Description of Artificial Sequence: Syntheticoligonucleotide
  source 1..27: mol_type = other RNA
cttaatctagttatgactattcttcaa

SEQ ID NO: 784 - RNA, 27 nt, synthetic construct
  misc_feature 1..27: note = Description of Artificial Sequence: Syntheticoligonucleotide
  source 1..27: mol_type = other RNA
gatcttaatctagttatgactattctt

SEQ ID NO: 785 - RNA, 27 nt, synthetic construct
  misc_feature 1..27: note = Description of Artificial Sequence: Syntheticoligonucleotide
  source 1..27: mol_type = other RNA
agatcttaatctagttatgactattct

SEQ ID NO: 786 - RNA, 27 nt, synthetic construct
  misc_feature 1..27: note = Description of Artificial Sequence: Syntheticoligonucleotide
  source 1..27: mol_type = other RNA
cagatcttaatctagttatgactattc

SEQ ID NO: 787 - RNA, 27 nt, synthetic construct
  misc_feature 1..27: note = Description of Artificial Sequence: Syntheticoligonucleotide
  source 1..27: mol_type = other RNA
acagatcttaatctagttatgactatt

SEQ ID NO: 788 - RNA, 27 nt, synthetic construct
  misc_feature 1..27: note = Description of Artificial Sequence: Syntheticoligonucleotide
  source 1..27: mol_type = other RNA
aaacacagatcttaatctagttatgac

SEQ ID NO: 789 - RNA, 27 nt, synthetic construct
  misc_feature 1..27: note = Description of Artificial Sequence: Syntheticoligonucleotide
  source 1..27: mol_type = other RNA
aaactaaaacacagatcttaatctagt

SEQ ID NO: 790 - RNA, 27 nt, synthetic construct
  misc_feature 1..27: note = Description of Artificial Sequence: Syntheticoligonucleotide
  source 1..27: mol_type = other RNA
ttaaactaaaacacagatcttaatcta

SEQ ID NO: 791 - RNA, 27 nt, synthetic construct
  misc_feature 1..27: note = Description of Artificial Sequence: Syntheticoligonucleotide
  source 1..27: mol_type = other RNA
attaaactaaaacacagatcttaatct

SEQ ID NO: 792 - RNA, 27 nt, synthetic construct
  misc_feature 1..27: note = Description of Artificial Sequence: Syntheticoligonucleotide
  source 1..27: mol_type = other RNA
ctattaaactaaaacacagatcttaat

SEQ ID NO: 793 - RNA, 27 nt, synthetic construct
  misc_feature 1..27: note = Description of Artificial Sequence: Syntheticoligonucleotide
  source 1..27: mol_type = other RNA
cttcaaactattaaactaaaacacaga

SEQ ID NO: 794 - RNA, 27 nt, synthetic construct
  misc_feature 1..27: note = Description of Artificial Sequence: Syntheticoligonucleotide
  source 1..27: mol_type = other RNA
acttcaaactattaaactaaaacacag

SEQ ID NO: 795 - RNA, 27 nt, synthetic construct
  misc_feature 1..27: note = Description of Artificial Sequence: Syntheticoligonucleotide
  source 1..27: mol_type = other RNA
gcacttcaaactattaaactaaaacac

SEQ ID NO: 796 - RNA, 27 nt, synthetic construct
  misc_feature 1..27: note = Description of Artificial Sequence: Syntheticoligonucleotide
  source 1..27: mol_type = other RNA
aggcacttcaaactattaaactaaaac

SEQ ID NO: 797 - RNA, 27 nt, synthetic construct
  misc_feature 1..27: note = Description of Artificial Sequence: Syntheticoligonucleotide
  source 1..27: mol_type = other RNA
caggcacttcaaactattaaactaaaa

SEQ ID NO: 798 - RNA, 27 nt, synthetic construct
  misc_feature 1..27: note = Description of Artificial Sequence: Syntheticoligonucleotide
  source 1..27: mol_type = other RNA
tctaaattacctatcattatcccaaac

SEQ ID NO: 799 - RNA, 27 nt, synthetic construct
  misc_feature 1..27: note = Description of Artificial Sequence: Syntheticoligonucleotide
  source 1..27: mol_type = other RNA
catctaaattacctatcattatcccaa

SEQ ID NO: 800 - RNA, 27 nt, synthetic construct
  misc_feature 1..27: note = Description of Artificial Sequence: Syntheticoligonucleotide
  source 1..27: mol_type = other RNA
attcatctaaattacctatcattatcc

SEQ ID NO: 801 - RNA, 27 nt, synthetic construct
  misc_feature 1..27: note = Description of Artificial Sequence: Syntheticoligonucleotide
  source 1..27: mol_type = other RNA
aattcatctaaattacctatcattatc

SEQ ID NO: 802 - RNA, 27 nt, synthetic construct
  misc_feature 1..27: note = Description of Artificial Sequence: Syntheticoligonucleotide
  source 1..27: mol_type = other RNA
ctaaattcatctaaattacctatcatt

SEQ ID NO: 803 - RNA, 27 nt, synthetic construct
  misc_feature 1..27: note = Description of Artificial Sequence: Syntheticoligonucleotide
  source 1..27: mol_type = other RNA
cctaaattcatctaaattacctatcat

SEQ ID NO: 804 - RNA, 27 nt, synthetic construct
  misc_feature 1..27: note = Description of Artificial Sequence: Syntheticoligonucleotide
  source 1..27: mol_type = other RNA
tttcccctaaattcatctaaattacct

SEQ ID NO: 805 - RNA, 27 nt, synthetic construct
  misc_feature 1..27: note = Description of Artificial Sequence: Syntheticoligonucleotide
  source 1..27: mol_type = other RNA
tttttcccctaaattcatctaaattac

SEQ ID NO: 806 - RNA, 27 nt, synthetic construct
  misc_feature 1..27: note = Description of Artificial Sequence: Syntheticoligonucleotide
  source 1..27: mol_type = other RNA
taacttttttttcccctaaattcatct

SEQ ID NO: 807 - RNA, 27 nt, synthetic construct
  misc_feature 1..27: note = Description of Artificial Sequence: Syntheticoligonucleotide
  source 1..27: mol_type = other RNA
ataacttttttttcccctaaattcatc

SEQ ID NO: 808 - RNA, 27 nt, synthetic construct
  misc_feature 1..27: note = Description of Artificial Sequence: Syntheticoligonucleotide
  source 1..27: mol_type = other RNA
catatctgcagataacttttttttccc

SEQ ID NO: 809 - RNA, 27 nt, synthetic construct
  misc_feature 1..27: note = Description of Artificial Sequence: Syntheticoligonucleotide
  source 1..27: mol_type = other RNA
acatatctgcagataacttttttttcc

SEQ ID NO: 810 - RNA, 27 nt, synthetic construct
  misc_feature 1..27: note = Description of Artificial Sequence: Syntheticoligonucleotide
  source 1..27: mol_type = other RNA
cctcaacatatctgcagataacttttt

SEQ ID NO: 811 - RNA, 27 nt, synthetic construct
  misc_feature 1..27: note = Description of Artificial Sequence: Syntheticoligonucleotide
  source 1..27: mol_type = other RNA
agtattttcaacatgaaaacacaagac

SEQ ID NO: 812 - RNA, 27 nt, synthetic construct
  misc_feature 1..27: note = Description of Artificial Sequence: Syntheticoligonucleotide
  source 1..27: mol_type = other RNA
aagtattttcaacatgaaaacacaaga

SEQ ID NO: 813 - RNA, 27 nt, synthetic construct
  misc_feature 1..27: note = Description of Artificial Sequence: Syntheticoligonucleotide
  source 1..27: mol_type = other RNA
aaagtattttcaacatgaaaacacaag

SEQ ID NO: 814 - RNA, 27 nt, synthetic construct
  misc_feature 1..27: note = Description of Artificial Sequence: Syntheticoligonucleotide
  source 1..27: mol_type = other RNA
gaaaaatgcaaaagtattttcaacatg

SEQ ID NO: 815 - RNA, 27 nt, synthetic construct
  misc_feature 1..27: note = Description of Artificial Sequence: Syntheticoligonucleotide
  source 1..27: mol_type = other RNA
ggaaaaatgcaaaagtattttcaacat

SEQ ID NO: 816 - RNA, 27 nt, synthetic construct
  misc_feature 1..27: note = Description of Artificial Sequence: Syntheticoligonucleotide
  source 1..27: mol_type = other RNA
aggaaaaatgcaaaagtattttcaaca

SEQ ID NO: 817 - RNA, 27 nt, synthetic construct
  misc_feature 1..27: note = Description of Artificial Sequence: Syntheticoligonucleotide
  source 1..27: mol_type = other RNA
aaggaaaaatgcaaaagtattttcaac

SEQ ID NO: 818 - RNA, 27 nt, synthetic construct
  misc_feature 1..27: note = Description of Artificial Sequence: Syntheticoligonucleotide
  source 1..27: mol_type = other RNA
ttggcactcaaaggaaaaatgcaaaag

SEQ ID NO: 819 - RNA, 27 nt, synthetic construct
  misc_feature 1..27: note = Description of Artificial Sequence: Syntheticoligonucleotide
  source 1..27: mol_type = other RNA
atagtactagtaagaaattggcactca

SEQ ID NO: 820 - RNA, 27 nt, synthetic construct
  misc_feature 1..27: note = Description of Artificial Sequence: Syntheticoligonucleotide
  source 1..27: mol_type = other RNA
aagaaatagtactagtaagaaattggc

SEQ ID NO: 821 - RNA, 27 nt, synthetic construct
  misc_feature 1..27: note = Description of Artificial Sequence: Syntheticoligonucleotide
  source 1..27: mol_type = other RNA
taagaaatagtactagtaagaaattgg

SEQ ID NO: 822 - RNA, 27 nt, synthetic construct
  misc_feature 1..27: note = Description of Artificial Sequence: Syntheticoligonucleotide
  source 1..27: mol_type = other RNA
atgttacattaagaaatagtactagta

SEQ ID NO: 823 - RNA, 27 nt, synthetic construct
  misc_feature 1..27: note = Description of Artificial Sequence: Syntheticoligonucleotide
  source 1..27: mol_type = other RNA
catgttacattaagaaatagtactagt

SEQ ID NO: 824 - RNA, 27 nt, synthetic construct
  misc_feature 1..27: note = Description of Artificial Sequence: Syntheticoligonucleotide
  source 1..27: mol_type = other RNA
gtaaacatgttacattaagaaatagta

SEQ ID NO: 825 - RNA, 27 nt, synthetic construct
  misc_feature 1..27: note = Description of Artificial Sequence: Syntheticoligonucleotide
  source 1..27: mol_type = other RNA
ggtaaacatgttacattaagaaatagt

SEQ ID NO: 826 - RNA, 27 nt, synthetic construct
  misc_feature 1..27: note = Description of Artificial Sequence: Syntheticoligonucleotide
  source 1..27: mol_type = other RNA
aggtaaacatgttacattaagaaatag

SEQ ID NO: 827 - RNA, 27 nt, synthetic construct
  misc_feature 1..27: note = Description of Artificial Sequence: Syntheticoligonucleotide
  source 1..27: mol_type = other RNA
acattccaggtaaacatgttacattaa

SEQ ID NO: 828 - RNA, 27 nt, synthetic construct
  misc_feature 1..27: note = Description of Artificial Sequence: Syntheticoligonucleotide
  source 1..27: mol_type = other RNA
acaaaaatagttaaaatacattccagg

SEQ ID NO: 829 - RNA, 27 nt, synthetic construct
  misc_feature 1..27: note = Description of Artificial Sequence: Syntheticoligonucleotide
  source 1..27: mol_type = other RNA
atacaaaaatagttaaaatacattcca

SEQ ID NO: 830 - RNA, 27 nt, synthetic construct
  misc_feature 1..27: note = Description of Artificial Sequence: Syntheticoligonucleotide
  source 1..27: mol_type = other RNA
tatacaaaaatagttaaaatacattcc

SEQ ID NO: 831 - RNA, 27 nt, synthetic construct
  misc_feature 1..27: note = Description of Artificial Sequence: Syntheticoligonucleotide
  source 1..27: mol_type = other RNA
ctatacaaaaatagttaaaatacattc

SEQ ID NO: 832 - RNA, 27 nt, synthetic construct
  misc_feature 1..27: note = Description of Artificial Sequence: Syntheticoligonucleotide
  source 1..27: mol_type = other RNA
actatacaaaaatagttaaaatacatt

SEQ ID NO: 833 - RNA, 27 nt, synthetic construct
  misc_feature 1..27: note = Description of Artificial Sequence: Syntheticoligonucleotide
  source 1..27: mol_type = other RNA
acactatacaaaaatagttaaaataca

SEQ ID NO: 834 - RNA, 27 nt, synthetic construct
  misc_feature 1..27: note = Description of Artificial Sequence: Syntheticoligonucleotide
  source 1..27: mol_type = other RNA
ttacactatacaaaaatagttaaaata

SEQ ID NO: 835 - RNA, 27 nt, synthetic construct
  misc_feature 1..27: note = Description of Artificial Sequence: Syntheticoligonucleotide
  source 1..27: mol_type = other RNA
tttacactatacaaaaatagttaaaat

SEQ ID NO: 836 - RNA, 27 nt, synthetic construct
  misc_feature 1..27: note = Description of Artificial Sequence: Syntheticoligonucleotide
  source 1..27: mol_type = other RNA
gtttacactatacaaaaatagttaaaa

SEQ ID NO: 837 - RNA, 27 nt, synthetic construct
  misc_feature 1..27: note = Description of Artificial Sequence: Syntheticoligonucleotide
  source 1..27: mol_type = other RNA
tgtttcagtttacactatacaaaaata

SEQ ID NO: 838 - RNA, 27 nt, synthetic construct
  misc_feature 1..27: note = Description of Artificial Sequence: Syntheticoligonucleotide
  source 1..27: mol_type = other RNA
atgtttcagtttacactatacaaaaat

SEQ ID NO: 839 - RNA, 27 nt, synthetic construct
  misc_feature 1..27: note = Description of Artificial Sequence: Syntheticoligonucleotide
  source 1..27: mol_type = other RNA
catgtttcagtttacactatacaaaaa

SEQ ID NO: 840 - RNA, 27 nt, synthetic construct
  misc_feature 1..27: note = Description of Artificial Sequence: Syntheticoligonucleotide
  source 1..27: mol_type = other RNA
aatgtacaaaatgtgcatgtttcagtt

SEQ ID NO: 841 - RNA, 27 nt, synthetic construct
  misc_feature 1..27: note = Description of Artificial Sequence: Syntheticoligonucleotide
  source 1..27: mol_type = other RNA
aagcacaatgtacaaaatgtgcatgtt

SEQ ID NO: 842 - RNA, 27 nt, synthetic construct
  misc_feature 1..27: note = Description of Artificial Sequence: Syntheticoligonucleotide
  source 1..27: mol_type = other RNA
gcaaccaaatgatggaaaacaactgga

SEQ ID NO: 843 - RNA, 27 nt, synthetic construct
  misc_feature 1..27: note = Description of Artificial Sequence: Syntheticoligonucleotide
  source 1..27: mol_type = other RNA
gcgcaaccaaatgatggaaaacaactg

SEQ ID NO: 844 - RNA, 27 nt, synthetic construct
  misc_feature 1..27: note = Description of Artificial Sequence: Syntheticoligonucleotide
  source 1..27: mol_type = other RNA
atttttaatgtttgatatgaccaacat

SEQ ID NO: 845 - RNA, 27 nt, synthetic construct
  misc_feature 1..27: note = Description of Artificial Sequence: Syntheticoligonucleotide
  source 1..27: mol_type = other RNA
catttttaatgtttgatatgaccaaca

SEQ ID NO: 846 - RNA, 27 nt, synthetic construct
  misc_feature 1..27: note = Description of Artificial Sequence: Syntheticoligonucleotide
  source 1..27: mol_type = other RNA
tcatttttaatgtttgatatgaccaac

SEQ ID NO: 847 - RNA, 27 nt, synthetic construct
  misc_feature 1..27: note = Description of Artificial Sequence: Syntheticoligonucleotide
  source 1..27: mol_type = other RNA
gtggtcatttttaatgtttgatatgac

SEQ ID NO: 848 - RNA, 27 nt, synthetic construct
  misc_feature 1..27: note = Description of Artificial Sequence: Syntheticoligonucleotide
  source 1..27: mol_type = other RNA
aatttcaattaaaagagtggtcatttt

SEQ ID NO: 849 - RNA, 27 nt, synthetic construct
  misc_feature 1..27: note = Description of Artificial Sequence: Syntheticoligonucleotide
  source 1..27: mol_type = other RNA
taatttcaattaaaagagtggtcattt

SEQ ID NO: 850 - RNA, 27 nt, synthetic construct
  misc_feature 1..27: note = Description of Artificial Sequence: Syntheticoligonucleotide
  source 1..27: mol_type = other RNA
tttaaaagttaatttcaattaaaagag

SEQ ID NO: 851 - RNA, 27 nt, synthetic construct
  misc_feature 1..27: note = Description of Artificial Sequence: Syntheticoligonucleotide
  source 1..27: mol_type = other RNA
atttaaaagttaatttcaattaaaaga

SEQ ID NO: 852 - RNA, 27 nt, synthetic construct
  misc_feature 1..27: note = Description of Artificial Sequence: Syntheticoligonucleotide
  source 1..27: mol_type = other RNA
acatttaaaagttaatttcaattaaaa

SEQ ID NO: 853 - RNA, 27 nt, synthetic construct
  misc_feature 1..27: note = Description of Artificial Sequence: Syntheticoligonucleotide
  source 1..27: mol_type = other RNA
aaacatttaaaagttaatttcaattaa

SEQ ID NO: 854 - RNA, 27 nt, synthetic construct
  misc_feature 1..27: note = Description of Artificial Sequence: Syntheticoligonucleotide
  source 1..27: mol_type = other RNA
taaacatttaaaagttaatttcaatta

SEQ ID NO: 855 - RNA, 27 nt, synthetic construct
  misc_feature 1..27: note = Description of Artificial Sequence: Syntheticoligonucleotide
  source 1..27: mol_type = other RNA
ataaacatttaaaagttaatttcaatt

SEQ ID NO: 856 - RNA, 27 nt, synthetic construct
  misc_feature 1..27: note = Description of Artificial Sequence: Syntheticoligonucleotide
  source 1..27: mol_type = other RNA
tataaacatttaaaagttaatttcaat

SEQ ID NO: 857 - RNA, 27 nt, synthetic construct
  misc_feature 1..27: note = Description of Artificial Sequence: Syntheticoligonucleotide
  source 1..27: mol_type = other RNA
ctataaacatttaaaagttaatttcaa

SEQ ID NO: 858 - RNA, 27 nt, synthetic construct
  misc_feature 1..27: note = Description of Artificial Sequence: Syntheticoligonucleotide
  source 1..27: mol_type = other RNA
cctataaacatttaaaagttaatttca

SEQ ID NO: 859 - RNA, 27 nt, synthetic construct
  misc_feature 1..27: note = Description of Artificial Sequence: Syntheticoligonucleotide
  source 1..27: mol_type = other RNA
actcctataaacatttaaaagttaatt

SEQ ID NO: 860 - RNA, 27 nt, synthetic construct
  misc_feature 1..27: note = Description of Artificial Sequence: Syntheticoligonucleotide
  source 1..27: mol_type = other RNA
acatactcctataaacatttaaaagtt

SEQ ID NO: 861 - RNA, 27 nt, synthetic construct
  misc_feature 1..27: note = Description of Artificial Sequence: Syntheticoligonucleotide
  source 1..27: mol_type = other RNA
cagcacatactcctataaacatttaaa

SEQ ID NO: 862 - RNA, 27 nt, synthetic construct
  misc_feature 1..27: note = Description of Artificial Sequence: Syntheticoligonucleotide
  source 1..27: mol_type = other RNA
acagcacatactcctataaacatttaa

SEQ ID NO: 863 - RNA, 27 nt, synthetic construct
  misc_feature 1..27: note = Description of Artificial Sequence: Syntheticoligonucleotide
  source 1..27: mol_type = other RNA
attacaaattttagatcacttcacagc

SEQ ID NO: 864 - RNA, 27 nt, synthetic construct
  misc_feature 1..27: note = Description of Artificial Sequence: Syntheticoligonucleotide
  source 1..27: mol_type = other RNA
atattacaaattttagatcacttcaca

SEQ ID NO: 865 - RNA, 27 nt, synthetic construct
  misc_feature 1..27: note = Description of Artificial Sequence: Syntheticoligonucleotide
  source 1..27: mol_type = other RNA
aatattacaaattttagatcacttcac

SEQ ID NO: 866 - RNA, 27 nt, synthetic construct
  misc_feature 1..27: note = Description of Artificial Sequence: Syntheticoligonucleotide
  source 1..27: mol_type = other RNA
aaatattacaaattttagatcacttca

SEQ ID NO: 867 - RNA, 27 nt, synthetic construct
  misc_feature 1..27: note = Description of Artificial Sequence: Syntheticoligonucleotide
  source 1..27: mol_type = other RNA
aaaatattacaaattttagatcacttc

SEQ ID NO: 868 - RNA, 27 nt, synthetic construct
  misc_feature 1..27: note = Description of Artificial Sequence: Syntheticoligonucleotide
  source 1..27: mol_type = other RNA
aaaaatattacaaattttagatcactt

SEQ ID NO: 869 - RNA, 27 nt, synthetic construct
  misc_feature 1..27: note = Description of Artificial Sequence: Syntheticoligonucleotide
  source 1..27: mol_type = other RNA
caaaaatattacaaattttagatcact

SEQ ID NO: 870 - RNA, 27 nt, synthetic construct
  misc_feature 1..27: note = Description of Artificial Sequence: Syntheticoligonucleotide
  source 1..27: mol_type = other RNA
atgacaaaaatattacaaattttagat

SEQ ID NO: 871 - RNA, 27 nt, synthetic construct
  misc_feature 1..27: note = Description of Artificial Sequence: Syntheticoligonucleotide
  source 1..27: mol_type = other RNA
catgacaaaaatattacaaattttaga

SEQ ID NO: 872 - RNA, 27 nt, synthetic construct
  misc_feature 1..27: note = Description of Artificial Sequence: Syntheticoligonucleotide
  source 1..27: mol_type = other RNA
agttcatgacaaaaatattacaaattt

SEQ ID NO: 873 - RNA, 27 nt, synthetic construct
  misc_feature 1..27: note = Description of Artificial Sequence: Syntheticoligonucleotide
  source 1..27: mol_type = other RNA
cagttcatgacaaaaatattacaaatt

SEQ ID NO: 874 - RNA, 27 nt, synthetic construct
  misc_feature 1..27: note = Description of Artificial Sequence: Syntheticoligonucleotide
  source 1..27: mol_type = other RNA
acagttcatgacaaaaatattacaaat

SEQ ID NO: 875 - RNA, 27 nt, synthetic construct
  misc_feature 1..27: note = Description of Artificial Sequence: Syntheticoligonucleotide
  source 1..27: mol_type = other RNA
tagtacagttcatgacaaaaatattac

SEQ ID NO: 876 - RNA, 27 nt, synthetic construct
  misc_feature 1..27: note = Description of Artificial Sequence: Syntheticoligonucleotide
  source 1..27: mol_type = other RNA
gtagtacagttcatgacaaaaatatta

SEQ ID NO: 877 - RNA, 27 nt, synthetic construct
  misc_feature 1..27: note = Description of Artificial Sequence: Syntheticoligonucleotide
  source 1..27: mol_type = other RNA
attacaataattaggagtagtacagtt

SEQ ID NO: 878 - RNA, 27 nt, synthetic construct
  misc_feature 1..27: note = Description of Artificial Sequence: Syntheticoligonucleotide
  source 1..27: mol_type = other RNA
cattacaataattaggagtagtacagt

SEQ ID NO: 879 - RNA, 27 nt, synthetic construct
  misc_feature 1..27: note = Description of Artificial Sequence: Syntheticoligonucleotide
  source 1..27: mol_type = other RNA
atttttattacattacaataattagga

SEQ ID NO: 880 - RNA, 27 nt, synthetic construct
  misc_feature 1..27: note = Description of Artificial Sequence: Syntheticoligonucleotide
  source 1..27: mol_type = other RNA
tatttttattacattacaataattagg

SEQ ID NO: 881 - RNA, 27 nt, synthetic construct
  misc_feature 1..27: note = Description of Artificial Sequence: Syntheticoligonucleotide
  source 1..27: mol_type = other RNA
actatttttattacattacaataatta

SEQ ID NO: 882 - RNA, 27 nt, synthetic construct
  misc_feature 1..27: note = Description of Artificial Sequence: Syntheticoligonucleotide
  source 1..27: mol_type = other RNA
taactatttttattacattacaataat

SEQ ID NO: 883 - RNA, 27 nt, synthetic construct
  misc_feature 1..27: note = Description of Artificial Sequence: Syntheticoligonucleotide
  source 1..27: mol_type = other RNA
gtaactatttttattacattacaataa

SEQ ID NO: 884 - RNA, 27 nt, synthetic construct
  misc_feature 1..27: note = Description of Artificial Sequence: Syntheticoligonucleotide
  source 1..27: mol_type = other RNA
ctgtaactatttttattacattacaat

SEQ ID NO: 885 - RNA, 27 nt, synthetic construct
  misc_feature 1..27: note = Description of Artificial Sequence: Syntheticoligonucleotide
  source 1..27: mol_type = other RNA
actgtaactatttttattacattacaa

SEQ ID NO: 886 - RNA, 27 nt, synthetic construct
  misc_feature 1..27: note = Description of Artificial Sequence: Syntheticoligonucleotide
  source 1..27: mol_type = other RNA
tgtcactgtaactatttttattacatt

SEQ ID NO: 887 - RNA, 27 nt, synthetic construct
  misc_feature 1..27: note = Description of Artificial Sequence: Syntheticoligonucleotide
  source 1..27: mol_type = other RNA
ttgtcactgtaactatttttattacat

SEQ ID NO: 888 - RNA, 27 nt, synthetic construct
  misc_feature 1..27: note = Description of Artificial Sequence: Syntheticoligonucleotide
  source 1..27: mol_type = other RNA
tttgtcactgtaactatttttattaca

SEQ ID NO: 889 - RNA, 27 nt, synthetic construct
  misc_feature 1..27: note = Description of Artificial Sequence: Syntheticoligonucleotide
  source 1..27: mol_type = other RNA
tttttttttttgtcactgtaactattt

SEQ ID NO: 890 - RNA, 27 nt, synthetic construct
  misc_feature 1..27: note = Description of Artificial Sequence: Syntheticoligonucleotide
  source 1..27: mol_type = other RNA
ttttttttttttgtcactgtaactatt

SEQ ID NO: 891 - RNA, 27 nt, synthetic construct
  misc_feature 1..27: note = Description of Artificial Sequence: Syntheticoligonucleotide
  source 1..27: mol_type = other RNA
ttttttttttttttgtcactgtaacta

SEQ ID NO: 892 - DNA, 25 bp, synthetic construct
  misc_feature 1..25: note = Description of Artificial Sequence: Syntheticoligonucleotide
  misc_feature 1..25: note = Description of Combined DNA/RNA Molecule: Syntheticoligonucleotide
  source 1..25: mol_type = other DNA
  modified_base order(2,8,12,16,18,23): mod_base = OTHER; note = Uracil
ctgaaaatgactgaatataaacttg

SEQ ID NO: 893 - RNA, 25 nt, synthetic construct
  misc_feature 1..25: note = Description of Artificial Sequence: Syntheticoligonucleotide
  source 1..25: mol_type = other RNA
atgactgaatataaacttgtggtag

SEQ ID NO: 894 - RNA, 25 nt, synthetic construct
  misc_feature 1..25: note = Description of Artificial Sequence: Syntheticoligonucleotide
  source 1..25: mol_type = other RNA
ctgaatataaacttgtggtagttgg

SEQ ID NO: 895 - RNA, 25 nt, synthetic construct
  misc_feature 1..25: note = Description of Artificial Sequence: Syntheticoligonucleotide
  source 1..25: mol_type = other RNA
ctaattcagaatcattttgtggacg

SEQ ID NO: 896 - DNA, 25 bp, synthetic construct
  misc_feature 1..25: note = Description of Artificial Sequence: Syntheticoligonucleotide
  misc_feature 1..25: note = Description of Combined DNA/RNA Molecule: Syntheticoligonucleotide
  source 1..25: mol_type = other DNA
  modified_base order(4,6,9,17): mod_base = OTHER; note = Uracil
gaatatgatccaacaatagaggatt

SEQ ID NO: 897 - DNA, 25 bp, synthetic construct
  misc_feature 1..25: note = Description of Artificial Sequence: Syntheticoligonucleotide
  misc_feature 1..25: note = Description of Combined DNA/RNA Molecule: Syntheticoligonucleotide
  source 1..25: mol_type = other DNA
  modified_base order(5,8,11,12,15): mod_base = OTHER; note = Uracil
caagtagtaattgatggagaaacct

SEQ ID NO: 898 - DNA, 25 bp, synthetic construct
  misc_feature 1..25: note = Description of Artificial Sequence: Syntheticoligonucleotide
  misc_feature 1..25: note = Description of Combined DNA/RNA Molecule: Syntheticoligonucleotide
  source 1..25: mol_type = other DNA
  modified_base order(6,7,8,10,11,12,14,16,18,19,20): mod_base = OTHER; note = Uracil
agggctttctttgtgtatttgccat

SEQ ID NO: 899 - RNA, 25 nt, synthetic construct
  misc_feature 1..25: note = Description of Artificial Sequence: Syntheticoligonucleotide
  source 1..25: mol_type = other RNA
tttgtgtatttgccataaataatac

SEQ ID NO: 900 - DNA, 25 bp, synthetic construct
  misc_feature 1..25: note = Description of Artificial Sequence: Syntheticoligonucleotide
  misc_feature 1..25: note = Description of Combined DNA/RNA Molecule: Syntheticoligonucleotide
  source 1..25: mol_type = other DNA
  modified_base order(1,2,4,6,8,9,10,15,19,22): mod_base = OTHER; note = Uracil
ttgtgtatttgccataaataatact

SEQ ID NO: 901 - DNA, 25 bp, synthetic construct
  misc_feature 1..25: note = Description of Artificial Sequence: Syntheticoligonucleotide
  misc_feature 1..25: note = Description of Combined DNA/RNA Molecule: Syntheticoligonucleotide
  source 1..25: mol_type = other DNA
  modified_base order(1,3,5,7,8,9,14,18,21): mod_base = OTHER; note = Uracil
tgtgtatttgccataaataatacta

SEQ ID NO: 902 - RNA, 25 nt, synthetic construct
  misc_feature 1..25: note = Description of Artificial Sequence: Syntheticoligonucleotide
  source 1..25: mol_type = other RNA
gtgtatttgccataaataatactaa

SEQ ID NO: 903 - RNA, 25 nt, synthetic construct
  misc_feature 1..25: note = Description of Artificial Sequence: Syntheticoligonucleotide
  source 1..25: mol_type = other RNA
atttgccataaataatactaaatca

SEQ ID NO: 904 - DNA, 25 bp, synthetic construct
  misc_feature 1..25: note = Description of Artificial Sequence: Syntheticoligonucleotide
  misc_feature 1..25: note = Description of Combined DNA/RNA Molecule: Syntheticoligonucleotide
  source 1..25: mol_type = other DNA
  modified_base order(1,2,3,8,12,15,18,22): mod_base = OTHER; note = Uracil
tttgccataaataatactaaatcat

SEQ ID NO: 905 - RNA, 25 nt, synthetic construct
  misc_feature 1..25: note = Description of Artificial Sequence: Syntheticoligonucleotide
  source 1..25: mol_type = other RNA
ataaataatactaaatcatttgaag

SEQ ID NO: 906 - RNA, 25 nt, synthetic construct
  misc_feature 1..25: note = Description of Artificial Sequence: Syntheticoligonucleotide
  source 1..25: mol_type = other RNA
taaataatactaaatcatttgaaga

SEQ ID NO: 907 - DNA, 25 bp, synthetic construct
  misc_feature 1..25: note = Description of Artificial Sequence: Syntheticoligonucleotide
  misc_feature 1..25: note = Description of Combined DNA/RNA Molecule: Syntheticoligonucleotide
  source 1..25: mol_type = other DNA
  modified_base order(3,6,9,13,16,17,18): mod_base = OTHER; note = Uracil
aataatactaaatcatttgaagata

SEQ ID NO: 908 - DNA, 25 bp, synthetic construct
  misc_feature 1..25: note = Description of Artificial Sequence: Syntheticoligonucleotide
  misc_feature 1..25: note = Description of Combined DNA/RNA Molecule: Syntheticoligonucleotide
  source 1..25: mol_type = other DNA
  modified_base order(2,5,8,12,15,16,17,23): mod_base = OTHER; note = Uracil
ataatactaaatcatttgaagatat

SEQ ID NO: 909 - DNA, 25 bp, synthetic construct
  misc_feature 1..25: note = Description of Artificial Sequence: Syntheticoligonucleotide
  misc_feature 1..25: note = Description of Combined DNA/RNA Molecule: Syntheticoligonucleotide
  source 1..25: mol_type = other DNA
  modified_base order(1,4,7,11,14,15,16,22): mod_base = OTHER; note = Uracil
taatactaaatcatttgaagatatt

SEQ ID NO: 910 - DNA, 25 bp, synthetic construct
  misc_feature 1..25: note = Description of Artificial Sequence: Syntheticoligonucleotide
  misc_feature 1..25: note = Description of Combined DNA/RNA Molecule: Syntheticoligonucleotide
  source 1..25: mol_type = other DNA
  modified_base order(3,6,10,13,14,15,21,23): mod_base = OTHER; note = Uracil
aatactaaatcatttgaagatattc

SEQ ID NO: 911 - RNA, 25 nt, synthetic construct
  misc_feature 1..25: note = Description of Artificial Sequence: Syntheticoligonucleotide
  source 1..25: mol_type = other RNA
ttgaagatattcaccattatagaga

SEQ ID NO: 912 - RNA, 25 nt, synthetic construct
  misc_feature 1..25: note = Description of Artificial Sequence: Syntheticoligonucleotide
  source 1..25: mol_type = other RNA
gaagatattcaccattatagagaac

SEQ ID NO: 913 - RNA, 25 nt, synthetic construct
  misc_feature 1..25: note = Description of Artificial Sequence: Syntheticoligonucleotide
  source 1..25: mol_type = other RNA
aagatattcaccattatagagaaca

SEQ ID NO: 914 - RNA, 25 nt, synthetic construct
  misc_feature 1..25: note = Description of Artificial Sequence: Syntheticoligonucleotide
  source 1..25: mol_type = other RNA
agatattcaccattatagagaacaa

SEQ ID NO: 915 - RNA, 25 nt, synthetic construct
  misc_feature 1..25: note = Description of Artificial Sequence: Syntheticoligonucleotide
  source 1..25: mol_type = other RNA
gatattcaccattatagagaacaaa

SEQ ID NO: 916 - DNA, 25 bp, synthetic construct
  misc_feature 1..25: note = Description of Artificial Sequence: Syntheticoligonucleotide
  misc_feature 1..25: note = Description of Combined DNA/RNA Molecule: Syntheticoligonucleotide
  source 1..25: mol_type = other DNA
  modified_base order(2,3,5,16,17): mod_base = OTHER; note = Uracil
attatagagaacaaattaaaagagt

SEQ ID NO: 917 - DNA, 25 bp, synthetic construct
  misc_feature 1..25: note = Description of Artificial Sequence: Syntheticoligonucleotide
  misc_feature 1..25: note = Description of Combined DNA/RNA Molecule: Syntheticoligonucleotide
  source 1..25: mol_type = other DNA
  modified_base order(1,3,14,15,23): mod_base = OTHER; note = Uracil
tatagagaacaaattaaaagagtta

SEQ ID NO: 918 - RNA, 25 nt, synthetic construct
  misc_feature 1..25: note = Description of Artificial Sequence: Syntheticoligonucleotide
  source 1..25: mol_type = other RNA
atagagaacaaattaaaagagttaa

SEQ ID NO: 919 - RNA, 25 nt, synthetic construct
  misc_feature 1..25: note = Description of Artificial Sequence: Syntheticoligonucleotide
  source 1..25: mol_type = other RNA
tagagaacaaattaaaagagttaag

SEQ ID NO: 920 - RNA, 25 nt, synthetic construct
  misc_feature 1..25: note = Description of Artificial Sequence: Syntheticoligonucleotide
  source 1..25: mol_type = other RNA
agagaacaaattaaaagagttaagg

SEQ ID NO: 921 - DNA, 25 bp, synthetic construct
  misc_feature 1..25: note = Description of Artificial Sequence: Syntheticoligonucleotide
  misc_feature 1..25: note = Description of Combined DNA/RNA Molecule: Syntheticoligonucleotide
  source 1..25: mol_type = other DNA
  modified_base order(3,10,14,16,19,20,21): mod_base = OTHER; note = Uracil
agtaggaaataaatgtgatttgcct

SEQ ID NO: 922 - DNA, 25 bp, synthetic construct
  misc_feature 1..25: note = Description of Artificial Sequence: Syntheticoligonucleotide
  misc_feature 1..25: note = Description of Combined DNA/RNA Molecule: Syntheticoligonucleotide
  source 1..25: mol_type = other DNA
  modified_base order(2,9,13,15,18,19,20): mod_base = OTHER; note = Uracil
gtaggaaataaatgtgatttgcctt

SEQ ID NO: 923 - RNA, 25 nt, synthetic construct
  misc_feature 1..25: note = Description of Artificial Sequence: Syntheticoligonucleotide
  source 1..25: mol_type = other RNA
gaagttatggaattccttttattga

SEQ ID NO: 924 - RNA, 25 nt, synthetic construct
  misc_feature 1..25: note = Description of Artificial Sequence: Syntheticoligonucleotide
  source 1..25: mol_type = other RNA
gttatggaattccttttattgaaac

SEQ ID NO: 925 - RNA, 25 nt, synthetic construct
  misc_feature 1..25: note = Description of Artificial Sequence: Syntheticoligonucleotide
  source 1..25: mol_type = other RNA
ttatggaattccttttattgaaaca

SEQ ID NO: 926 - DNA, 25 bp, synthetic construct
  misc_feature 1..25: note = Description of Artificial Sequence: Syntheticoligonucleotide
  misc_feature 1..25: note = Description of Combined DNA/RNA Molecule: Syntheticoligonucleotide
  source 1..25: mol_type = other DNA
  modified_base order(1,3,8,9,12,13,14,15,17,18): mod_base = OTHER; note = Uracil
tatggaattccttttattgaaacat

SEQ ID NO: 927 - DNA, 25 bp, synthetic construct
  misc_feature 1..25: note = Description of Artificial Sequence: Syntheticoligonucleotide
  misc_feature 1..25: note = Description of Combined DNA/RNA Molecule: Syntheticoligonucleotide
  source 1..25: mol_type = other DNA
  modified_base order(2,7,8,11,12,13,14,16,17): mod_base = OTHER; note = Uracil
atggaattccttttattgaaacatc

SEQ ID NO: 928 - RNA, 25 nt, synthetic construct
  misc_feature 1..25: note = Description of Artificial Sequence: Syntheticoligonucleotide
  source 1..25: mol_type = other RNA
gaggatgctttttatacattggtga

SEQ ID NO: 929 - RNA, 25 nt, synthetic construct
  misc_feature 1..25: note = Description of Artificial Sequence: Syntheticoligonucleotide
  source 1..25: mol_type = other RNA
ggatgctttttatacattggtgagg

SEQ ID NO: 930 - RNA, 25 nt, synthetic construct
  misc_feature 1..25: note = Description of Artificial Sequence: Syntheticoligonucleotide
  source 1..25: mol_type = other RNA
agattgaaaaaaatcagcaaagaag

SEQ ID NO: 931 - RNA, 25 nt, synthetic construct
  misc_feature 1..25: note = Description of Artificial Sequence: Syntheticoligonucleotide
  source 1..25: mol_type = other RNA
gattgaaaaaaatcagcaaagaaga

SEQ ID NO: 932 - RNA, 25 nt, synthetic construct
  misc_feature 1..25: note = Description of Artificial Sequence: Syntheticoligonucleotide
  source 1..25: mol_type = other RNA
ttgaaaaaaatcagcaaagaagaaa

SEQ ID NO: 933 - RNA, 25 nt, synthetic construct
  misc_feature 1..25: note = Description of Artificial Sequence: Syntheticoligonucleotide
  source 1..25: mol_type = other RNA
tgaaaaaaatcagcaaagaagaaaa

SEQ ID NO: 934 - RNA, 25 nt, synthetic construct
  misc_feature 1..25: note = Description of Artificial Sequence: Syntheticoligonucleotide
  source 1..25: mol_type = other RNA
gaaaaaaatcagcaaagaagaaaag

SEQ ID NO: 935 - RNA, 25 nt, synthetic construct
  misc_feature 1..25: note = Description of Artificial Sequence: Syntheticoligonucleotide
  source 1..25: mol_type = other RNA
aaaaaaatcagcaaagaagaaaaga

SEQ ID NO: 936 - DNA, 25 bp, synthetic construct
  misc_feature 1..25: note = Description of Artificial Sequence: Syntheticoligonucleotide
  misc_feature 1..25: note = Description of Combined DNA/RNA Molecule: Syntheticoligonucleotide
  source 1..25: mol_type = other DNA
  modified_base order(2,6,8,10,16,17): mod_base = OTHER; note = Uracil
ctggctgtgtgaaaattaaaaaatg

SEQ ID NO: 937 - DNA, 25 bp, synthetic construct
  misc_feature 1..25: note = Description of Artificial Sequence: Syntheticoligonucleotide
  misc_feature 1..25: note = Description of Combined DNA/RNA Molecule: Syntheticoligonucleotide
  source 1..25: mol_type = other DNA
  modified_base order(2,4,6,12,13,20): mod_base = OTHER; note = Uracil
ctgtgtgaaaattaaaaaatgcatt

SEQ ID NO: 938 - RNA, 25 nt, synthetic construct
  misc_feature 1..25: note = Description of Artificial Sequence: Syntheticoligonucleotide
  source 1..25: mol_type = other RNA
gtgaaaattaaaaaatgcattataa

SEQ ID NO: 939 - DNA, 25 bp, synthetic construct
  misc_feature 1..25: note = Description of Artificial Sequence: Syntheticoligonucleotide
  misc_feature 1..25: note = Description of Combined DNA/RNA Molecule: Syntheticoligonucleotide
  source 1..25: mol_type = other DNA
  modified_base order(1,7,8,15,19,20,22): mod_base = OTHER; note = Uracil
tgaaaattaaaaaatgcattataat

SEQ ID NO: 940 - DNA, 25 bp, synthetic construct
  misc_feature 1..25: note = Description of Artificial Sequence: Syntheticoligonucleotide
  misc_feature 1..25: note = Description of Combined DNA/RNA Molecule: Syntheticoligonucleotide
  source 1..25: mol_type = other DNA
  modified_base order(6,7,14,18,19,21): mod_base = OTHER; note = Uracil
gaaaattaaaaaatgcattataatg

SEQ ID NO: 941 - DNA, 25 bp, synthetic construct
  misc_feature 1..25: note = Description of Artificial Sequence: Syntheticoligonucleotide
  misc_feature 1..25: note = Description of Combined DNA/RNA Molecule: Syntheticoligonucleotide
  source 1..25: mol_type = other DNA
  modified_base order(5,6,13,17,18,20,23): mod_base = OTHER; note = Uracil
aaaattaaaaaatgcattataatgt

SEQ ID NO: 942 - RNA, 25 nt, synthetic construct
  misc_feature 1..25: note = Description of Artificial Sequence: Syntheticoligonucleotide
  source 1..25: mol_type = other RNA
aattaaaaaatgcattataatgtaa

SEQ ID NO: 943 - DNA, 25 bp, synthetic construct
  misc_feature 1..25: note = Description of Artificial Sequence: Syntheticoligonucleotide
  misc_feature 1..25: note = Description of Combined DNA/RNA Molecule: Syntheticoligonucleotide
  source 1..25: mol_type = other DNA
  modified_base order(2,3,10,14,15,17,20,22): mod_base = OTHER; note = Uracil
attaaaaaatgcattataatgtaat

SEQ ID NO: 944 - DNA, 25 bp, synthetic construct
  misc_feature 1..25: note = Description of Artificial Sequence: Syntheticoligonucleotide
  misc_feature 1..25: note = Description of Combined DNA/RNA Molecule: Syntheticoligonucleotide
  source 1..25: mol_type = other DNA
  modified_base order(1,2,9,13,14,16,19,21): mod_base = OTHER; note = Uracil
ttaaaaaatgcattataatgtaatc

SEQ ID NO: 945 - DNA, 25 bp, synthetic construct
  misc_feature 1..25: note = Description of Artificial Sequence: Syntheticoligonucleotide
  misc_feature 1..25: note = Description of Combined DNA/RNA Molecule: Syntheticoligonucleotide
  source 1..25: mol_type = other DNA
  modified_base order(1,8,12,13,15,18,20,23): mod_base = OTHER; note = Uracil
taaaaaatgcattataatgtaatct

SEQ ID NO: 946 - RNA, 25 nt, synthetic construct
  misc_feature 1..25: note = Description of Artificial Sequence: Syntheticoligonucleotide
  source 1..25: mol_type = other RNA
aaaaatgcattataatgtaatctgg

SEQ ID NO: 947 - RNA, 25 nt, synthetic construct
  misc_feature 1..25: note = Description of Artificial Sequence: Syntheticoligonucleotide
  source 1..25: mol_type = other RNA
cattataatgtaatctgggtgttga

SEQ ID NO: 948 - RNA, 25 nt, synthetic construct
  misc_feature 1..25: note = Description of Artificial Sequence: Syntheticoligonucleotide
  source 1..25: mol_type = other RNA
cgagaaattcgaaaacataaagaaa

SEQ ID NO: 949 - RNA, 25 nt, synthetic construct
  misc_feature 1..25: note = Description of Artificial Sequence: Syntheticoligonucleotide
  source 1..25: mol_type = other RNA
gagaaattcgaaaacataaagaaaa

SEQ ID NO: 950 - RNA, 25 nt, synthetic construct
  misc_feature 1..25: note = Description of Artificial Sequence: Syntheticoligonucleotide
  source 1..25: mol_type = other RNA
agaaattcgaaaacataaagaaaag

SEQ ID NO: 951 - DNA, 25 bp, synthetic construct
  misc_feature 1..25: note = Description of Artificial Sequence: Syntheticoligonucleotide
  misc_feature 1..25: note = Description of Combined DNA/RNA Molecule: Syntheticoligonucleotide
  source 1..25: mol_type = other DNA
  modified_base order(3,4,13): mod_base = OTHER; note = Uracil
aattcgaaaacataaagaaaagatg

SEQ ID NO: 952 - RNA, 25 nt, synthetic construct
  misc_feature 1..25: note = Description of Artificial Sequence: Syntheticoligonucleotide
  source 1..25: mol_type = other RNA
gaaaacataaagaaaagatgagcaa

SEQ ID NO: 953 - RNA, 25 nt, synthetic construct
  misc_feature 1..25: note = Description of Artificial Sequence: Syntheticoligonucleotide
  source 1..25: mol_type = other RNA
aaaacataaagaaaagatgagcaaa

SEQ ID NO: 954 - RNA, 25 nt, synthetic construct
  misc_feature 1..25: note = Description of Artificial Sequence: Syntheticoligonucleotide
  source 1..25: mol_type = other RNA
agatggtaaaaagaagaaaaagaag

SEQ ID NO: 955 - DNA, 25 bp, synthetic construct
  misc_feature 1..25: note = Description of Artificial Sequence: Syntheticoligonucleotide
  misc_feature 1..25: note = Description of Combined DNA/RNA Molecule: Syntheticoligonucleotide
  source 1..25: mol_type = other DNA
  modified_base order(3,6): mod_base = OTHER; note = Uracil
gatggtaaaaagaagaaaaagaagt

SEQ ID NO: 956 - RNA, 25 nt, synthetic construct
  misc_feature 1..25: note = Description of Artificial Sequence: Syntheticoligonucleotide
  source 1..25: mol_type = other RNA
tggtaaaaagaagaaaaagaagtca

SEQ ID NO: 957 - RNA, 25 nt, synthetic construct
  misc_feature 1..25: note = Description of Artificial Sequence: Syntheticoligonucleotide
  source 1..25: mol_type = other RNA
ggtaaaaagaagaaaaagaagtcaa

SEQ ID NO: 958 - RNA, 25 nt, synthetic construct
  misc_feature 1..25: note = Description of Artificial Sequence: Syntheticoligonucleotide
  source 1..25: mol_type = other RNA
aaagaagaaaaagaagtcaaagaca

SEQ ID NO: 959 - RNA, 25 nt, synthetic construct
  misc_feature 1..25: note = Description of Artificial Sequence: Syntheticoligonucleotide
  source 1..25: mol_type = other RNA
aagaagaaaaagaagtcaaagacaa

SEQ ID NO: 960 - RNA, 25 nt, synthetic construct
  misc_feature 1..25: note = Description of Artificial Sequence: Syntheticoligonucleotide
  source 1..25: mol_type = other RNA
agaagaaaaagaagtcaaagacaaa

SEQ ID NO: 961 - RNA, 25 nt, synthetic construct
  misc_feature 1..25: note = Description of Artificial Sequence: Syntheticoligonucleotide
  source 1..25: mol_type = other RNA
aaagacaaagtgtgtaattatgtaa

SEQ ID NO: 962 - RNA, 25 nt, synthetic construct
  misc_feature 1..25: note = Description of Artificial Sequence: Syntheticoligonucleotide
  source 1..25: mol_type = other RNA
aagacaaagtgtgtaattatgtaaa

SEQ ID NO: 963 - RNA, 25 nt, synthetic construct
  misc_feature 1..25: note = Description of Artificial Sequence: Syntheticoligonucleotide
  source 1..25: mol_type = other RNA
caaagtgtgtaattatgtaaataca

SEQ ID NO: 964 - DNA, 25 bp, synthetic construct
  misc_feature 1..25: note = Description of Artificial Sequence: Syntheticoligonucleotide
  misc_feature 1..25: note = Description of Combined DNA/RNA Molecule: Syntheticoligonucleotide
  source 1..25: mol_type = other DNA
  modified_base order(4,6,8,11,12,14,16,20): mod_base = OTHER; note = Uracil
aagtgtgtaattatgtaaatacaat

SEQ ID NO: 965 - DNA, 25 bp, synthetic construct
  misc_feature 1..25: note = Description of Artificial Sequence: Syntheticoligonucleotide
  misc_feature 1..25: note = Description of Combined DNA/RNA Molecule: Syntheticoligonucleotide
  source 1..25: mol_type = other DNA
  modified_base order(2,4,7,8,10,12,16,21,22,23): mod_base = OTHER; note = Uracil
gtgtaattatgtaaatacaatttgt

SEQ ID NO: 966 - RNA, 25 nt, synthetic construct
  misc_feature 1..25: note = Description of Artificial Sequence: Syntheticoligonucleotide
  source 1..25: mol_type = other RNA
gtaattatgtaaatacaatttgtac

SEQ ID NO: 967 - DNA, 25 bp, synthetic construct
  misc_feature 1..25: note = Description of Artificial Sequence: Syntheticoligonucleotide
  misc_feature 1..25: note = Description of Combined DNA/RNA Molecule: Syntheticoligonucleotide
  source 1..25: mol_type = other DNA
  modified_base order(3,4,6,8,12,17,18,19,21): mod_base = OTHER; note = Uracil
aattatgtaaatacaatttgtactt

SEQ ID NO: 968 - DNA, 25 bp, synthetic construct
  misc_feature 1..25: note = Description of Artificial Sequence: Syntheticoligonucleotide
  misc_feature 1..25: note = Description of Combined DNA/RNA Molecule: Syntheticoligonucleotide
  source 1..25: mol_type = other DNA
  modified_base order(2,3,5,7,11,16,17,18,20,23): mod_base = OTHER; note = Uracil
attatgtaaatacaatttgtacttt

SEQ ID NO: 969 - DNA, 25 bp, synthetic construct
  misc_feature 1..25: note = Description of Artificial Sequence: Syntheticoligonucleotide
  misc_feature 1..25: note = Description of Combined DNA/RNA Molecule: Syntheticoligonucleotide
  source 1..25: mol_type = other DNA
  modified_base order(1,3,7,12,13,14,16,19,20,21,22,23): mod_base = OTHER; note = Uracil
tgtaaatacaatttgtacttttttc

SEQ ID NO: 970 - DNA, 25 bp, synthetic construct
  misc_feature 1..25: note = Description of Artificial Sequence: Syntheticoligonucleotide
  misc_feature 1..25: note = Description of Combined DNA/RNA Molecule: Syntheticoligonucleotide
  source 1..25: mol_type = other DNA
  modified_base order(2,6,11,12,13,15,18,19,20,21,22,23): mod_base = OTHER; note = Uracil
gtaaatacaatttgtacttttttct

SEQ ID NO: 971 - DNA, 25 bp, synthetic construct
  misc_feature 1..25: note = Description of Artificial Sequence: Syntheticoligonucleotide
  misc_feature 1..25: note = Description of Combined DNA/RNA Molecule: Syntheticoligonucleotide
  source 1..25: mol_type = other DNA
  modified_base order(1,5,10,11,12,14,17,18,19,20,21,22): mod_base = OTHER; note = Uracil
taaatacaatttgtacttttttctt

SEQ ID NO: 972 - DNA, 25 bp, synthetic construct
  misc_feature 1..25: note = Description of Artificial Sequence: Syntheticoligonucleotide
  misc_feature 1..25: note = Description of Combined DNA/RNA Molecule: Syntheticoligonucleotide
  source 1..25: mol_type = other DNA
  modified_base order(4,9,10,11,13,16,17,18,19,20,21,23): mod_base = OTHER; note = Uracil
aaatacaatttgtacttttttctta

SEQ ID NO: 973 - DNA, 25 bp, synthetic construct
  misc_feature 1..25: note = Description of Artificial Sequence: Syntheticoligonucleotide
  misc_feature 1..25: note = Description of Combined DNA/RNA Molecule: Syntheticoligonucleotide
  source 1..25: mol_type = other DNA
  modified_base order(3,4,5,7,10,11,12,13,14,15,17,18): mod_base = OTHER; note = Uracil
aatttgtacttttttcttaaggcat

SEQ ID NO: 974 - DNA, 25 bp, synthetic construct
  misc_feature 1..25: note = Description of Artificial Sequence: Syntheticoligonucleotide
  misc_feature 1..25: note = Description of Combined DNA/RNA Molecule: Syntheticoligonucleotide
  source 1..25: mol_type = other DNA
  modified_base order(2,3,4,6,9,10,11,12,13,14,16,17): mod_base = OTHER; note = Uracil
atttgtacttttttcttaaggcata

SEQ ID NO: 975 - RNA, 25 nt, synthetic construct
  misc_feature 1..25: note = Description of Artificial Sequence: Syntheticoligonucleotide
  source 1..25: mol_type = other RNA
ctagtacaagtggtaatttttgtac

SEQ ID NO: 976 - RNA, 25 nt, synthetic construct
  misc_feature 1..25: note = Description of Artificial Sequence: Syntheticoligonucleotide
  source 1..25: mol_type = other RNA
tagtacaagtggtaatttttgtaca

SEQ ID NO: 977 - RNA, 25 nt, synthetic construct
  misc_feature 1..25: note = Description of Artificial Sequence: Syntheticoligonucleotide
  source 1..25: mol_type = other RNA
aagtggtaatttttgtacattacac

SEQ ID NO: 978 - DNA, 25 bp, synthetic construct
  misc_feature 1..25: note = Description of Artificial Sequence: Syntheticoligonucleotide
  misc_feature 1..25: note = Description of Combined DNA/RNA Molecule: Syntheticoligonucleotide
  source 1..25: mol_type = other DNA
  modified_base order(3,6,9,10,11,12,13,15,19,20): mod_base = OTHER; note = Uracil
agtggtaatttttgtacattacact

SEQ ID NO: 979 - DNA, 25 bp, synthetic construct
  misc_feature 1..25: note = Description of Artificial Sequence: Syntheticoligonucleotide
  misc_feature 1..25: note = Description of Combined DNA/RNA Molecule: Syntheticoligonucleotide
  source 1..25: mol_type = other DNA
  modified_base order(2,3,4,5,6,8,12,13,18,22,23): mod_base = OTHER; note = Uracil
atttttgtacattacactaaattat

SEQ ID NO: 980 - DNA, 25 bp, synthetic construct
  misc_feature 1..25: note = Description of Artificial Sequence: Syntheticoligonucleotide
  misc_feature 1..25: note = Description of Combined DNA/RNA Molecule: Syntheticoligonucleotide
  source 1..25: mol_type = other DNA
  modified_base order(1,2,3,4,5,7,11,12,17,21,22): mod_base = OTHER; note = Uracil
tttttgtacattacactaaattatt

SEQ ID NO: 981 - DNA, 25 bp, synthetic construct
  misc_feature 1..25: note = Description of Artificial Sequence: Syntheticoligonucleotide
  misc_feature 1..25: note = Description of Combined DNA/RNA Molecule: Syntheticoligonucleotide
  source 1..25: mol_type = other DNA
  modified_base order(1,2,3,4,6,10,11,16,20,21,23): mod_base = OTHER; note = Uracil
ttttgtacattacactaaattatta

SEQ ID NO: 982 - RNA, 25 nt, synthetic construct
  misc_feature 1..25: note = Description of Artificial Sequence: Syntheticoligonucleotide
  source 1..25: mol_type = other RNA
tttgtacattacactaaattattag

SEQ ID NO: 983 - RNA, 25 nt, synthetic construct
  misc_feature 1..25: note = Description of Artificial Sequence: Syntheticoligonucleotide
  source 1..25: mol_type = other RNA
ttgtacattacactaaattattagc

SEQ ID NO: 984 - RNA, 25 nt, synthetic construct
  misc_feature 1..25: note = Description of Artificial Sequence: Syntheticoligonucleotide
  source 1..25: mol_type = other RNA
ctaaattattagcatttgttttagc

SEQ ID NO: 985 - DNA, 25 bp, synthetic construct
  misc_feature 1..25: note = Description of Artificial Sequence: Syntheticoligonucleotide
  misc_feature 1..25: note = Description of Combined DNA/RNA Molecule: Syntheticoligonucleotide
  source 1..25: mol_type = other DNA
  modified_base order(4,5,7,8,13,14,15,17,18,19,20): mod_base = OTHER; note = Uracil
aaattattagcatttgttttagcat

SEQ ID NO: 986 - DNA, 25 bp, synthetic construct
  misc_feature 1..25: note = Description of Artificial Sequence: Syntheticoligonucleotide
  misc_feature 1..25: note = Description of Combined DNA/RNA Molecule: Syntheticoligonucleotide
  source 1..25: mol_type = other DNA
  modified_base order(3,4,6,7,12,13,14,16,17,18,19): mod_base = OTHER; note = Uracil
aattattagcatttgttttagcatt

SEQ ID NO: 987 - DNA, 25 bp, synthetic construct
  misc_feature 1..25: note = Description of Artificial Sequence: Syntheticoligonucleotide
  misc_feature 1..25: note = Description of Combined DNA/RNA Molecule: Syntheticoligonucleotide
  source 1..25: mol_type = other DNA
  modified_base order(1,2,7,8,9,11,12,13,14,19,20): mod_base = OTHER; note = Uracil
ttagcatttgttttagcattaccta

SEQ ID NO: 988 - DNA, 25 bp, synthetic construct
  misc_feature 1..25: note = Description of Artificial Sequence: Syntheticoligonucleotide
  misc_feature 1..25: note = Description of Combined DNA/RNA Molecule: Syntheticoligonucleotide
  source 1..25: mol_type = other DNA
  modified_base order(1,2,3,5,6,7,8,13,14,18,21,22,23): mod_base = OTHER; note = Uracil
tttgttttagcattacctaattttt

SEQ ID NO: 989 - DNA, 25 bp, synthetic construct
  misc_feature 1..25: note = Description of Artificial Sequence: Syntheticoligonucleotide
  misc_feature 1..25: note = Description of Combined DNA/RNA Molecule: Syntheticoligonucleotide
  source 1..25: mol_type = other DNA
  modified_base order(1,2,4,5,6,7,12,13,17,20,21,22,23): mod_base = OTHER; note = Uracil
ttgttttagcattacctaatttttt

SEQ ID NO: 990 - DNA, 25 bp, synthetic construct
  misc_feature 1..25: note = Description of Artificial Sequence: Syntheticoligonucleotide
  misc_feature 1..25: note = Description of Combined DNA/RNA Molecule: Syntheticoligonucleotide
  source 1..25: mol_type = other DNA
  modified_base order(2,3,4,5,10,11,15,18,19,20,21,22,23): mod_base = OTHER; note = Uracil
gttttagcattacctaatttttttc

SEQ ID NO: 991 - RNA, 25 nt, synthetic construct
  misc_feature 1..25: note = Description of Artificial Sequence: Syntheticoligonucleotide
  source 1..25: mol_type = other RNA
ttttagcattacctaatttttttcc

SEQ ID NO: 992 - DNA, 25 bp, synthetic construct
  misc_feature 1..25: note = Description of Artificial Sequence: Syntheticoligonucleotide
  misc_feature 1..25: note = Description of Combined DNA/RNA Molecule: Syntheticoligonucleotide
  source 1..25: mol_type = other DNA
  modified_base order(1,2,3,8,9,13,16,17,18,19,20,21,22): mod_base = OTHER; note = Uracil
tttagcattacctaatttttttcct

SEQ ID NO: 993 - DNA, 25 bp, synthetic construct
  misc_feature 1..25: note = Description of Artificial Sequence: Syntheticoligonucleotide
  misc_feature 1..25: note = Description of Combined DNA/RNA Molecule: Syntheticoligonucleotide
  source 1..25: mol_type = other DNA
  modified_base order(1,2,7,8,12,15,16,17,18,19,20,21): mod_base = OTHER; note = Uracil
ttagcattacctaatttttttcctg

SEQ ID NO: 994 - DNA, 25 bp, synthetic construct
  misc_feature 1..25: note = Description of Artificial Sequence: Syntheticoligonucleotide
  misc_feature 1..25: note = Description of Combined DNA/RNA Molecule: Syntheticoligonucleotide
  source 1..25: mol_type = other DNA
  modified_base order(2,4,5,9,10,11,12,16,17,21): mod_base = OTHER; note = Uracil
ctgttagcttttaccttaaatgctt

SEQ ID NO: 995 - DNA, 25 bp, synthetic construct
  misc_feature 1..25: note = Description of Artificial Sequence: Syntheticoligonucleotide
  misc_feature 1..25: note = Description of Combined DNA/RNA Molecule: Syntheticoligonucleotide
  source 1..25: mol_type = other DNA
  modified_base order(1,3,4,8,9,10,11,15,16,20,23): mod_base = OTHER; note = Uracil
tgttagcttttaccttaaatgctta

SEQ ID NO: 996 - RNA, 25 nt, synthetic construct
  misc_feature 1..25: note = Description of Artificial Sequence: Syntheticoligonucleotide
  source 1..25: mol_type = other RNA
cttttaccttaaatgcttattttaa

SEQ ID NO: 997 - RNA, 25 nt, synthetic construct
  misc_feature 1..25: note = Description of Artificial Sequence: Syntheticoligonucleotide
  source 1..25: mol_type = other RNA
ttttaccttaaatgcttattttaaa

SEQ ID NO: 998 - RNA, 25 nt, synthetic construct
  misc_feature 1..25: note = Description of Artificial Sequence: Syntheticoligonucleotide
  source 1..25: mol_type = other RNA
tttaccttaaatgcttattttaaaa

SEQ ID NO: 999 - RNA, 25 nt, synthetic construct
  misc_feature 1..25: note = Description of Artificial Sequence: Syntheticoligonucleotide
  source 1..25: mol_type = other RNA
ttaaatgcttattttaaaatgacag

SEQ ID NO: 1000 - DNA, 25 bp, synthetic construct
  misc_feature 1..25: note = Description of Artificial Sequence: Syntheticoligonucleotide
  misc_feature 1..25: note = Description of Combined DNA/RNA Molecule: Syntheticoligonucleotide
  source 1..25: mol_type = other DNA
  modified_base order(1,5,8,9,11,12,13,14,19): mod_base = OTHER; note = Uracil
taaatgcttattttaaaatgacagt

SEQ ID NO: 1001 - DNA, 25 bp, synthetic construct
  misc_feature 1..25: note = Description of Artificial Sequence: Syntheticoligonucleotide
  misc_feature 1..25: note = Description of Combined DNA/RNA Molecule: Syntheticoligonucleotide
  source 1..25: mol_type = other DNA
  modified_base order(2,3,5,6,7,8,13,19): mod_base = OTHER; note = Uracil
cttattttaaaatgacagtggaagt

SEQ ID NO: 1002 - DNA, 25 bp, synthetic construct
  misc_feature 1..25: note = Description of Artificial Sequence: Syntheticoligonucleotide
  misc_feature 1..25: note = Description of Combined DNA/RNA Molecule: Syntheticoligonucleotide
  source 1..25: mol_type = other DNA
  modified_base order(1,3,4,5,6,11,17,23): mod_base = OTHER; note = Uracil
tattttaaaatgacagtggaagttt

SEQ ID NO: 1003 - RNA, 25 nt, synthetic construct
  misc_feature 1..25: note = Description of Artificial Sequence: Syntheticoligonucleotide
  source 1..25: mol_type = other RNA
ggaagtttttttttcctctaagtgc

SEQ ID NO: 1004 - RNA, 25 nt, synthetic construct
  misc_feature 1..25: note = Description of Artificial Sequence: Syntheticoligonucleotide
  source 1..25: mol_type = other RNA
aagtttttttttcctctaagtgcca

SEQ ID NO: 1005 - RNA, 25 nt, synthetic construct
  misc_feature 1..25: note = Description of Artificial Sequence: Syntheticoligonucleotide
  source 1..25: mol_type = other RNA
agtttttttttcctctaagtgccag

SEQ ID NO: 1006 - DNA, 25 bp, synthetic construct
  misc_feature 1..25: note = Description of Artificial Sequence: Syntheticoligonucleotide
  misc_feature 1..25: note = Description of Combined DNA/RNA Molecule: Syntheticoligonucleotide
  source 1..25: mol_type = other DNA
  modified_base order(1,2,5,6,7,8,9,14,20): mod_base = OTHER; note = Uracil
ttggtttttgaactagcaatgcctg

SEQ ID NO: 1007 - DNA, 25 bp, synthetic construct
  misc_feature 1..25: note = Description of Artificial Sequence: Syntheticoligonucleotide
  misc_feature 1..25: note = Description of Combined DNA/RNA Molecule: Syntheticoligonucleotide
  source 1..25: mol_type = other DNA
  modified_base order(2,4,16,20): mod_base = OTHER; note = Uracil
ctgtgaaaaagaaactgaataccta

SEQ ID NO: 1008 - DNA, 25 bp, synthetic construct
  misc_feature 1..25: note = Description of Artificial Sequence: Syntheticoligonucleotide
  misc_feature 1..25: note = Description of Combined DNA/RNA Molecule: Syntheticoligonucleotide
  source 1..25: mol_type = other DNA
  modified_base order(9,13,17,22,23): mod_base = OTHER; note = Uracil
aaagaaactgaatacctaagatttc

SEQ ID NO: 1009 - DNA, 25 bp, synthetic construct
  misc_feature 1..25: note = Description of Artificial Sequence: Syntheticoligonucleotide
  misc_feature 1..25: note = Description of Combined DNA/RNA Molecule: Syntheticoligonucleotide
  source 1..25: mol_type = other DNA
  modified_base order(8,12,16,21,22,23): mod_base = OTHER; note = Uracil
aagaaactgaatacctaagatttct

SEQ ID NO: 1010 - DNA, 25 bp, synthetic construct
  misc_feature 1..25: note = Description of Artificial Sequence: Syntheticoligonucleotide
  misc_feature 1..25: note = Description of Combined DNA/RNA Molecule: Syntheticoligonucleotide
  source 1..25: mol_type = other DNA
  modified_base order(2,6,10,15,16,17,19,21,23): mod_base = OTHER; note = Uracil
ctgaatacctaagatttctgtcttg

SEQ ID NO: 1011 - DNA, 25 bp, synthetic construct
  misc_feature 1..25: note = Description of Artificial Sequence: Syntheticoligonucleotide
  misc_feature 1..25: note = Description of Combined DNA/RNA Molecule: Syntheticoligonucleotide
  source 1..25: mol_type = other DNA
  modified_base order(4,5,8,9,12,13,15,16,18,19,20,21,22): mod_base = OTHER; note = Uracil
cagttgattacttcttatttttctt

SEQ ID NO: 1012 - DNA, 25 bp, synthetic construct
  misc_feature 1..25: note = Description of Artificial Sequence: Syntheticoligonucleotide
  misc_feature 1..25: note = Description of Combined DNA/RNA Molecule: Syntheticoligonucleotide
  source 1..25: mol_type = other DNA
  modified_base order(3,4,7,8,11,12,14,15,17,18,19,20,21,23): mod_base = OTHER; note = Uracil
agttgattacttcttatttttctta

SEQ ID NO: 1013 - RNA, 25 nt, synthetic construct
  misc_feature 1..25: note = Description of Artificial Sequence: Syntheticoligonucleotide
  source 1..25: mol_type = other RNA
gattacttcttatttttcttaccaa

SEQ ID NO: 1014 - DNA, 25 bp, synthetic construct
  misc_feature 1..25: note = Description of Artificial Sequence: Syntheticoligonucleotide
  misc_feature 1..25: note = Description of Combined DNA/RNA Molecule: Syntheticoligonucleotide
  source 1..25: mol_type = other DNA
  modified_base order(2,3,5,6,7,8,9,11,12,18,19,21): mod_base = OTHER; note = Uracil
cttatttttcttaccaattgtgaat

SEQ ID NO: 1015 - DNA, 25 bp, synthetic construct
  misc_feature 1..25: note = Description of Artificial Sequence: Syntheticoligonucleotide
  misc_feature 1..25: note = Description of Combined DNA/RNA Molecule: Syntheticoligonucleotide
  source 1..25: mol_type = other DNA
  modified_base order(1,2,4,5,6,7,8,10,11,17,18,20): mod_base = OTHER; note = Uracil
ttatttttcttaccaattgtgaatg

SEQ ID NO: 1016 - DNA, 25 bp, synthetic construct
  misc_feature 1..25: note = Description of Artificial Sequence: Syntheticoligonucleotide
  misc_feature 1..25: note = Description of Combined DNA/RNA Molecule: Syntheticoligonucleotide
  source 1..25: mol_type = other DNA
  modified_base order(1,3,4,5,6,7,9,10,16,17,19,23): mod_base = OTHER; note = Uracil
tatttttcttaccaattgtgaatgt

SEQ ID NO: 1017 - RNA, 25 nt, synthetic construct
  misc_feature 1..25: note = Description of Artificial Sequence: Syntheticoligonucleotide
  source 1..25: mol_type = other RNA
gttggtgtgaaacaaattaatgaag

SEQ ID NO: 1018 - DNA, 25 bp, synthetic construct
  misc_feature 1..25: note = Description of Artificial Sequence: Syntheticoligonucleotide
  misc_feature 1..25: note = Description of Combined DNA/RNA Molecule: Syntheticoligonucleotide
  source 1..25: mol_type = other DNA
  modified_base order(3,5,14,15,18): mod_base = OTHER; note = Uracil
ggtgtgaaacaaattaatgaagctt

SEQ ID NO: 1019 - DNA, 25 bp, synthetic construct
  misc_feature 1..25: note = Description of Artificial Sequence: Syntheticoligonucleotide
  misc_feature 1..25: note = Description of Combined DNA/RNA Molecule: Syntheticoligonucleotide
  source 1..25: mol_type = other DNA
  modified_base order(2,4,13,14,17,23): mod_base = OTHER; note = Uracil
gtgtgaaacaaattaatgaagcttt

SEQ ID NO: 1020 - DNA, 25 bp, synthetic construct
  misc_feature 1..25: note = Description of Artificial Sequence: Syntheticoligonucleotide
  misc_feature 1..25: note = Description of Combined DNA/RNA Molecule: Syntheticoligonucleotide
  source 1..25: mol_type = other DNA
  modified_base order(5,6,9,15,16,17,18,22): mod_base = OTHER; note = Uracil
caaattaatgaagcttttgaatcat

SEQ ID NO: 1021 - DNA, 25 bp, synthetic construct
  misc_feature 1..25: note = Description of Artificial Sequence: Syntheticoligonucleotide
  misc_feature 1..25: note = Description of Combined DNA/RNA Molecule: Syntheticoligonucleotide
  source 1..25: mol_type = other DNA
  modified_base order(4,5,8,14,15,16,17,21): mod_base = OTHER; note = Uracil
aaattaatgaagcttttgaatcatc

SEQ ID NO: 1022 - DNA, 25 bp, synthetic construct
  misc_feature 1..25: note = Description of Artificial Sequence: Syntheticoligonucleotide
  misc_feature 1..25: note = Description of Combined DNA/RNA Molecule: Syntheticoligonucleotide
  source 1..25: mol_type = other DNA
  modified_base order(1,3,5,6,7,8,10,12,15,20): mod_base = OTHER; note = Uracil
tgtgttttatctagtcacataaatg

SEQ ID NO: 1023 - RNA, 25 nt, synthetic construct
  misc_feature 1..25: note = Description of Artificial Sequence: Syntheticoligonucleotide
  source 1..25: mol_type = other RNA
gtgttttatctagtcacataaatgg

SEQ ID NO: 1024 - DNA, 25 bp, synthetic construct
  misc_feature 1..25: note = Description of Artificial Sequence: Syntheticoligonucleotide
  misc_feature 1..25: note = Description of Combined DNA/RNA Molecule: Syntheticoligonucleotide
  source 1..25: mol_type = other DNA
  modified_base order(1,2,3,4,6,8,11,16,20): mod_base = OTHER; note = Uracil
ttttatctagtcacataaatggatt

SEQ ID NO: 1025 - DNA, 25 bp, synthetic construct
  misc_feature 1..25: note = Description of Artificial Sequence: Syntheticoligonucleotide
  misc_feature 1..25: note = Description of Combined DNA/RNA Molecule: Syntheticoligonucleotide
  source 1..25: mol_type = other DNA
  modified_base order(1,2,3,5,7,10,15,19,23): mod_base = OTHER; note = Uracil
tttatctagtcacataaatggatta

SEQ ID NO: 1026 - RNA, 25 nt, synthetic construct
  misc_feature 1..25: note = Description of Artificial Sequence: Syntheticoligonucleotide
  source 1..25: mol_type = other RNA
ctagtcacataaatggattaattac

SEQ ID NO: 1027 - DNA, 25 bp, synthetic construct
  misc_feature 1..25: note = Description of Artificial Sequence: Syntheticoligonucleotide
  misc_feature 1..25: note = Description of Combined DNA/RNA Molecule: Syntheticoligonucleotide
  source 1..25: mol_type = other DNA
  modified_base order(1,4,9,13,17,18,21,22): mod_base = OTHER; note = Uracil
tagtcacataaatggattaattact

SEQ ID NO: 1028 - RNA, 25 nt, synthetic construct
  misc_feature 1..25: note = Description of Artificial Sequence: Syntheticoligonucleotide
  source 1..25: mol_type = other RNA
taaatggattaattactaatttcag

SEQ ID NO: 1029 - DNA, 25 bp, synthetic construct
  misc_feature 1..25: note = Description of Artificial Sequence: Syntheticoligonucleotide
  misc_feature 1..25: note = Description of Combined DNA/RNA Molecule: Syntheticoligonucleotide
  source 1..25: mol_type = other DNA
  modified_base order(4,8,9,12,13,16,19,20,21): mod_base = OTHER; note = Uracil
aaatggattaattactaatttcagt

SEQ ID NO: 1030 - RNA, 25 nt, synthetic construct
  misc_feature 1..25: note = Description of Artificial Sequence: Syntheticoligonucleotide
  source 1..25: mol_type = other RNA
gattaattactaatttcagttgaga

SEQ ID NO: 1031 - RNA, 25 nt, synthetic construct
  misc_feature 1..25: note = Description of Artificial Sequence: Syntheticoligonucleotide
  source 1..25: mol_type = other RNA
ttaattactaatttcagttgagacc

SEQ ID NO: 1032 - DNA, 25 bp, synthetic construct
  misc_feature 1..25: note = Description of Artificial Sequence: Syntheticoligonucleotide
  misc_feature 1..25: note = Description of Combined DNA/RNA Molecule: Syntheticoligonucleotide
  source 1..25: mol_type = other DNA
  modified_base order(1,4,5,8,11,12,13,17,18): mod_base = OTHER; note = Uracil
taattactaatttcagttgagacct

SEQ ID NO: 1033 - DNA, 25 bp, synthetic construct
  misc_feature 1..25: note = Description of Artificial Sequence: Syntheticoligonucleotide
  misc_feature 1..25: note = Description of Combined DNA/RNA Molecule: Syntheticoligonucleotide
  source 1..25: mol_type = other DNA
  modified_base order(3,4,7,10,11,12,16,17): mod_base = OTHER; note = Uracil
aattactaatttcagttgagacctt

SEQ ID NO: 1034 - RNA, 25 nt, synthetic construct
  misc_feature 1..25: note = Description of Artificial Sequence: Syntheticoligonucleotide
  source 1..25: mol_type = other RNA
attggtttttactgaaacattgagg

SEQ ID NO: 1035 - RNA, 25 nt, synthetic construct
  misc_feature 1..25: note = Description of Artificial Sequence: Syntheticoligonucleotide
  source 1..25: mol_type = other RNA
gtttttactgaaacattgagggaac

SEQ ID NO: 1036 - RNA, 25 nt, synthetic construct
  misc_feature 1..25: note = Description of Artificial Sequence: Syntheticoligonucleotide
  source 1..25: mol_type = other RNA
tttttactgaaacattgagggaaca

SEQ ID NO: 1037 - DNA, 25 bp, synthetic construct
  misc_feature 1..25: note = Description of Artificial Sequence: Syntheticoligonucleotide
  misc_feature 1..25: note = Description of Combined DNA/RNA Molecule: Syntheticoligonucleotide
  source 1..25: mol_type = other DNA
  modified_base order(1,15,16,17,19): mod_base = OTHER; note = Uracil
tgagggaacacaaatttatgggctt

SEQ ID NO: 1038 - DNA, 25 bp, synthetic construct
  misc_feature 1..25: note = Description of Artificial Sequence: Syntheticoligonucleotide
  misc_feature 1..25: note = Description of Combined DNA/RNA Molecule: Syntheticoligonucleotide
  source 1..25: mol_type = other DNA
  modified_base order(14,15,16,18,23): mod_base = OTHER; note = Uracil
gagggaacacaaatttatgggcttc

SEQ ID NO: 1039 - RNA, 25 nt, synthetic construct
  misc_feature 1..25: note = Description of Artificial Sequence: Syntheticoligonucleotide
  source 1..25: mol_type = other RNA
atgaatgtaaagttacactgttcac

SEQ ID NO: 1040 - RNA, 25 nt, synthetic construct
  misc_feature 1..25: note = Description of Artificial Sequence: Syntheticoligonucleotide
  source 1..25: mol_type = other RNA
tgaatgtaaagttacactgttcaca

SEQ ID NO: 1041 - RNA, 25 nt, synthetic construct
  misc_feature 1..25: note = Description of Artificial Sequence: Syntheticoligonucleotide
  source 1..25: mol_type = other RNA
aaaatattatattttttctataaaa

SEQ ID NO: 1042 - RNA, 25 nt, synthetic construct
  misc_feature 1..25: note = Description of Artificial Sequence: Syntheticoligonucleotide
  source 1..25: mol_type = other RNA
aaatattatattttttctataaaaa

SEQ ID NO: 1043 - RNA, 25 nt, synthetic construct
  misc_feature 1..25: note = Description of Artificial Sequence: Syntheticoligonucleotide
  source 1..25: mol_type = other RNA
aatattatattttttctataaaaag

SEQ ID NO: 1044 - RNA, 25 nt, synthetic construct
  misc_feature 1..25: note = Description of Artificial Sequence: Syntheticoligonucleotide
  source 1..25: mol_type = other RNA
atattatattttttctataaaaaga

SEQ ID NO: 1045 - RNA, 25 nt, synthetic construct
  misc_feature 1..25: note = Description of Artificial Sequence: Syntheticoligonucleotide
  source 1..25: mol_type = other RNA
attatattttttctataaaaagaaa

SEQ ID NO: 1046 - RNA, 25 nt, synthetic construct
  misc_feature 1..25: note = Description of Artificial Sequence: Syntheticoligonucleotide
  source 1..25: mol_type = other RNA
ttatattttttctataaaaagaaaa

SEQ ID NO: 1047 - RNA, 25 nt, synthetic construct
  misc_feature 1..25: note = Description of Artificial Sequence: Syntheticoligonucleotide
  source 1..25: mol_type = other RNA
tatattttttctataaaaagaaaaa

SEQ ID NO: 1048 - RNA, 25 nt, synthetic construct
  misc_feature 1..25: note = Description of Artificial Sequence: Syntheticoligonucleotide
  source 1..25: mol_type = other RNA
atattttttctataaaaagaaaaaa

SEQ ID NO: 1049 - RNA, 25 nt, synthetic construct
  misc_feature 1..25: note = Description of Artificial Sequence: Syntheticoligonucleotide
  source 1..25: mol_type = other RNA
tattttttctataaaaagaaaaaaa

SEQ ID NO: 1050 - DNA, 25 bp, synthetic construct
  misc_feature 1..25: note = Description of Artificial Sequence: Syntheticoligonucleotide
  misc_feature 1..25: note = Description of Combined DNA/RNA Molecule: Syntheticoligonucleotide
  source 1..25: mol_type = other DNA
  modified_base order(2,3,4,5,6,7,9,11): mod_base = OTHER; note = Uracil
attttttctataaaaagaaaaaaat

SEQ ID NO: 1051 - DNA, 25 bp, synthetic construct
  misc_feature 1..25: note = Description of Artificial Sequence: Syntheticoligonucleotide
  misc_feature 1..25: note = Description of Combined DNA/RNA Molecule: Syntheticoligonucleotide
  source 1..25: mol_type = other DNA
  modified_base order(1,2,3,4,5,6,8,10): mod_base = OTHER; note = Uracil
ttttttctataaaaagaaaaaaatg

SEQ ID NO: 1052 - RNA, 25 nt, synthetic construct
  misc_feature 1..25: note = Description of Artificial Sequence: Syntheticoligonucleotide
  source 1..25: mol_type = other RNA
tttttctataaaaagaaaaaaatgg

SEQ ID NO: 1053 - RNA, 25 nt, synthetic construct
  misc_feature 1..25: note = Description of Artificial Sequence: Syntheticoligonucleotide
  source 1..25: mol_type = other RNA
ctataaaaagaaaaaaatggaaaaa

SEQ ID NO: 1054 - RNA, 25 nt, synthetic construct
  misc_feature 1..25: note = Description of Artificial Sequence: Syntheticoligonucleotide
  source 1..25: mol_type = other RNA
tataaaaagaaaaaaatggaaaaaa

SEQ ID NO: 1055 - DNA, 25 bp, synthetic construct
  misc_feature 1..25: note = Description of Artificial Sequence: Syntheticoligonucleotide
  misc_feature 1..25: note = Description of Combined DNA/RNA Molecule: Syntheticoligonucleotide
  source 1..25: mol_type = other DNA
  modified_base order(1,15): mod_base = OTHER; note = Uracil
taaaaagaaaaaaatggaaaaaaat

SEQ ID NO: 1056 - DNA, 25 bp, synthetic construct
  misc_feature 1..25: note = Description of Artificial Sequence: Syntheticoligonucleotide
  misc_feature 1..25: note = Description of Combined DNA/RNA Molecule: Syntheticoligonucleotide
  source 1..25: mol_type = other DNA
  modified_base 14: mod_base = OTHER; note = Uracil
aaaaagaaaaaaatggaaaaaaatt

SEQ ID NO: 1057 - DNA, 25 bp, synthetic construct
  misc_feature 1..25: note = Description of Artificial Sequence: Syntheticoligonucleotide
  misc_feature 1..25: note = Description of Combined DNA/RNA Molecule: Syntheticoligonucleotide
  source 1..25: mol_type = other DNA
  modified_base order(13,23): mod_base = OTHER; note = Uracil
aaaagaaaaaaatggaaaaaaatta

SEQ ID NO: 1058 - RNA, 25 nt, synthetic construct
  misc_feature 1..25: note = Description of Artificial Sequence: Syntheticoligonucleotide
  source 1..25: mol_type = other RNA
aaagaaaaaaatggaaaaaaattac

SEQ ID NO: 1059 - RNA, 25 nt, synthetic construct
  misc_feature 1..25: note = Description of Artificial Sequence: Syntheticoligonucleotide
  source 1..25: mol_type = other RNA
aagaaaaaaatggaaaaaaattaca

SEQ ID NO: 1060 - RNA, 25 nt, synthetic construct
  misc_feature 1..25: note = Description of Artificial Sequence: Syntheticoligonucleotide
  source 1..25: mol_type = other RNA
agaaaaaaatggaaaaaaattacaa

SEQ ID NO: 1061 - RNA, 25 nt, synthetic construct
  misc_feature 1..25: note = Description of Artificial Sequence: Syntheticoligonucleotide
  source 1..25: mol_type = other RNA
gaaaaaaatggaaaaaaattacaag

SEQ ID NO: 1062 - RNA, 25 nt, synthetic construct
  misc_feature 1..25: note = Description of Artificial Sequence: Syntheticoligonucleotide
  source 1..25: mol_type = other RNA
aaaatggaaaaaaattacaaggcaa

SEQ ID NO: 1063 - DNA, 25 bp, synthetic construct
  misc_feature 1..25: note = Description of Artificial Sequence: Syntheticoligonucleotide
  misc_feature 1..25: note = Description of Combined DNA/RNA Molecule: Syntheticoligonucleotide
  source 1..25: mol_type = other DNA
  modified_base order(4,14,15): mod_base = OTHER; note = Uracil
aaatggaaaaaaattacaaggcaat

SEQ ID NO: 1064 - RNA, 25 nt, synthetic construct
  misc_feature 1..25: note = Description of Artificial Sequence: Syntheticoligonucleotide
  source 1..25: mol_type = other RNA
gaaaaaaattacaaggcaatggaaa

SEQ ID NO: 1065 - RNA, 25 nt, synthetic construct
  misc_feature 1..25: note = Description of Artificial Sequence: Syntheticoligonucleotide
  source 1..25: mol_type = other RNA
aaaaaaattacaaggcaatggaaac

SEQ ID NO: 1066 - DNA, 25 bp, synthetic construct
  misc_feature 1..25: note = Description of Artificial Sequence: Syntheticoligonucleotide
  misc_feature 1..25: note = Description of Combined DNA/RNA Molecule: Syntheticoligonucleotide
  source 1..25: mol_type = other DNA
  modified_base order(7,8,18): mod_base = OTHER; note = Uracil
aaaaaattacaaggcaatggaaact

SEQ ID NO: 1067 - DNA, 25 bp, synthetic construct
  misc_feature 1..25: note = Description of Artificial Sequence: Syntheticoligonucleotide
  misc_feature 1..25: note = Description of Combined DNA/RNA Molecule: Syntheticoligonucleotide
  source 1..25: mol_type = other DNA
  modified_base order(3,4,5,8,9,10,11,16,17,21): mod_base = OTHER; note = Uracil
catttccttttcacattagataaat

SEQ ID NO: 1068 - DNA, 25 bp, synthetic construct
  misc_feature 1..25: note = Description of Artificial Sequence: Syntheticoligonucleotide
  misc_feature 1..25: note = Description of Combined DNA/RNA Molecule: Syntheticoligonucleotide
  source 1..25: mol_type = other DNA
  modified_base order(2,3,4,5,10,11,15,19,20,23): mod_base = OTHER; note = Uracil
cttttcacattagataaattactat

SEQ ID NO: 1069 - DNA, 25 bp, synthetic construct
  misc_feature 1..25: note = Description of Artificial Sequence: Syntheticoligonucleotide
  misc_feature 1..25: note = Description of Combined DNA/RNA Molecule: Syntheticoligonucleotide
  source 1..25: mol_type = other DNA
  modified_base order(3,4,8,12,13,16,18): mod_base = OTHER; note = Uracil
cattagataaattactataaagact

SEQ ID NO: 1070 - DNA, 25 bp, synthetic construct
  misc_feature 1..25: note = Description of Artificial Sequence: Syntheticoligonucleotide
  misc_feature 1..25: note = Description of Combined DNA/RNA Molecule: Syntheticoligonucleotide
  source 1..25: mol_type = other DNA
  modified_base order(2,3,7,11,12,15,17): mod_base = OTHER; note = Uracil
attagataaattactataaagactc

SEQ ID NO: 1071 - RNA, 25 nt, synthetic construct
  misc_feature 1..25: note = Description of Artificial Sequence: Syntheticoligonucleotide
  source 1..25: mol_type = other RNA
ttagataaattactataaagactcc

SEQ ID NO: 1072 - RNA, 25 nt, synthetic construct
  misc_feature 1..25: note = Description of Artificial Sequence: Syntheticoligonucleotide
  source 1..25: mol_type = other RNA
tatgaaatggggattattatagcaa

SEQ ID NO: 1073 - RNA, 25 nt, synthetic construct
  misc_feature 1..25: note = Description of Artificial Sequence: Syntheticoligonucleotide
  source 1..25: mol_type = other RNA
gggattattatagcaaccattttgg

SEQ ID NO: 1074 - DNA, 25 bp, synthetic construct
  misc_feature 1..25: note = Description of Artificial Sequence: Syntheticoligonucleotide
  misc_feature 1..25: note = Description of Combined DNA/RNA Molecule: Syntheticoligonucleotide
  source 1..25: mol_type = other DNA
  modified_base order(2,4,6,7,8,12,15,18,22,23): mod_base = OTHER; note = Uracil
ctatatttacatgctactaaatttt

SEQ ID NO: 1075 - DNA, 25 bp, synthetic construct
  misc_feature 1..25: note = Description of Artificial Sequence: Syntheticoligonucleotide
  misc_feature 1..25: note = Description of Combined DNA/RNA Molecule: Syntheticoligonucleotide
  source 1..25: mol_type = other DNA
  modified_base order(1,3,5,6,7,11,14,17,21,22,23): mod_base = OTHER; note = Uracil
tatatttacatgctactaaattttt

SEQ ID NO: 1076 - DNA, 25 bp, synthetic construct
  misc_feature 1..25: note = Description of Artificial Sequence: Syntheticoligonucleotide
  misc_feature 1..25: note = Description of Combined DNA/RNA Molecule: Syntheticoligonucleotide
  source 1..25: mol_type = other DNA
  modified_base order(2,4,5,6,10,13,16,20,21,22,23): mod_base = OTHER; note = Uracil
atatttacatgctactaaattttta

SEQ ID NO: 1077 - DNA, 25 bp, synthetic construct
  misc_feature 1..25: note = Description of Artificial Sequence: Syntheticoligonucleotide
  misc_feature 1..25: note = Description of Combined DNA/RNA Molecule: Syntheticoligonucleotide
  source 1..25: mol_type = other DNA
  modified_base order(1,3,4,5,9,12,15,19,20,21,22,23): mod_base = OTHER; note = Uracil
tatttacatgctactaaatttttat

SEQ ID NO: 1078 - DNA, 25 bp, synthetic construct
  misc_feature 1..25: note = Description of Artificial Sequence: Syntheticoligonucleotide
  misc_feature 1..25: note = Description of Combined DNA/RNA Molecule: Syntheticoligonucleotide
  source 1..25: mol_type = other DNA
  modified_base order(2,3,4,8,11,14,18,19,20,21,22): mod_base = OTHER; note = Uracil
atttacatgctactaaatttttata

SEQ ID NO: 1079 - DNA, 25 bp, synthetic construct
  misc_feature 1..25: note = Description of Artificial Sequence: Syntheticoligonucleotide
  misc_feature 1..25: note = Description of Combined DNA/RNA Molecule: Syntheticoligonucleotide
  source 1..25: mol_type = other DNA
  modified_base order(3,6,9,13,14,15,16,17,19,22): mod_base = OTHER; note = Uracil
catgctactaaatttttataataat

SEQ ID NO: 1080 - RNA, 25 nt, synthetic construct
  misc_feature 1..25: note = Description of Artificial Sequence: Syntheticoligonucleotide
  source 1..25: mol_type = other RNA
ctaaatttttataataattgaaaag

SEQ ID NO: 1081 - RNA, 25 nt, synthetic construct
  misc_feature 1..25: note = Description of Artificial Sequence: Syntheticoligonucleotide
  source 1..25: mol_type = other RNA
taaatttttataataattgaaaaga

SEQ ID NO: 1082 - DNA, 25 bp, synthetic construct
  misc_feature 1..25: note = Description of Artificial Sequence: Syntheticoligonucleotide
  misc_feature 1..25: note = Description of Combined DNA/RNA Molecule: Syntheticoligonucleotide
  source 1..25: mol_type = other DNA
  modified_base order(3,4,5,6,7,9,12,15,16): mod_base = OTHER; note = Uracil
aatttttataataattgaaaagatt

SEQ ID NO: 1083 - DNA, 25 bp, synthetic construct
  misc_feature 1..25: note = Description of Artificial Sequence: Syntheticoligonucleotide
  misc_feature 1..25: note = Description of Combined DNA/RNA Molecule: Syntheticoligonucleotide
  source 1..25: mol_type = other DNA
  modified_base order(2,3,4,5,6,8,11,14,15,23): mod_base = OTHER; note = Uracil
atttttataataattgaaaagattt

SEQ ID NO: 1084 - DNA, 25 bp, synthetic construct
  misc_feature 1..25: note = Description of Artificial Sequence: Syntheticoligonucleotide
  misc_feature 1..25: note = Description of Combined DNA/RNA Molecule: Syntheticoligonucleotide
  source 1..25: mol_type = other DNA
  modified_base order(1,2,3,4,5,7,10,13,14,22,23): mod_base = OTHER; note = Uracil
tttttataataattgaaaagatttt

SEQ ID NO: 1085 - DNA, 25 bp, synthetic construct
  misc_feature 1..25: note = Description of Artificial Sequence: Syntheticoligonucleotide
  misc_feature 1..25: note = Description of Combined DNA/RNA Molecule: Syntheticoligonucleotide
  source 1..25: mol_type = other DNA
  modified_base order(1,2,3,4,6,9,12,13,21,22,23): mod_base = OTHER; note = Uracil
ttttataataattgaaaagatttta

SEQ ID NO: 1086 - RNA, 25 nt, synthetic construct
  misc_feature 1..25: note = Description of Artificial Sequence: Syntheticoligonucleotide
  source 1..25: mol_type = other RNA
tttataataattgaaaagattttaa

SEQ ID NO: 1087 - RNA, 25 nt, synthetic construct
  misc_feature 1..25: note = Description of Artificial Sequence: Syntheticoligonucleotide
  source 1..25: mol_type = other RNA
ttataataattgaaaagattttaac

SEQ ID NO: 1088 - RNA, 25 nt, synthetic construct
  misc_feature 1..25: note = Description of Artificial Sequence: Syntheticoligonucleotide
  source 1..25: mol_type = other RNA
tataataattgaaaagattttaaca

SEQ ID NO: 1089 - RNA, 25 nt, synthetic construct
  misc_feature 1..25: note = Description of Artificial Sequence: Syntheticoligonucleotide
  source 1..25: mol_type = other RNA
ataataattgaaaagattttaacaa

SEQ ID NO: 1090 - RNA, 25 nt, synthetic construct
  misc_feature 1..25: note = Description of Artificial Sequence: Syntheticoligonucleotide
  source 1..25: mol_type = other RNA
taataattgaaaagattttaacaag

SEQ ID NO: 1091 - DNA, 25 bp, synthetic construct
  misc_feature 1..25: note = Description of Artificial Sequence: Syntheticoligonucleotide
  misc_feature 1..25: note = Description of Artificial Sequence: Syntheticoligonucleotide
  source 1..25: mol_type = other DNA
  modified_base order(3,4,12,13,14,15,22): mod_base = OTHER; note = Uracil
aattgaaaagattttaacaagtata

SEQ ID NO: 1092 - RNA, 25 nt, synthetic construct
  misc_feature 1..25: note = Description of Artificial Sequence: Syntheticoligonucleotide
  source 1..25: mol_type = other RNA
attgaaaagattttaacaagtataa

SEQ ID NO: 1093 - RNA, 25 nt, synthetic construct
  misc_feature 1..25: note = Description of Artificial Sequence: Syntheticoligonucleotide
  source 1..25: mol_type = other RNA
tgaaaagattttaacaagtataaaa

SEQ ID NO: 1094 - RNA, 25 nt, synthetic construct
  misc_feature 1..25: note = Description of Artificial Sequence: Syntheticoligonucleotide
  source 1..25: mol_type = other RNA
gaaaagattttaacaagtataaaaa

SEQ ID NO: 1095 - RNA, 25 nt, synthetic construct
  misc_feature 1..25: note = Description of Artificial Sequence: Syntheticoligonucleotide
  source 1..25: mol_type = other RNA
aaaagattttaacaagtataaaaaa

SEQ ID NO: 1096 - DNA, 25 bp, synthetic construct
  misc_feature 1..25: note = Description of Artificial Sequence: Syntheticoligonucleotide
  misc_feature 1..25: note = Description of Artificial Sequence: Syntheticoligonucleotide
  source 1..25: mol_type = other DNA
  modified_base order(6,7,8,9,16,18): mod_base = OTHER; note = Uracil
aaagattttaacaagtataaaaaat

SEQ ID NO: 1097 - DNA, 25 bp, synthetic construct
  misc_feature 1..25: note = Description of Artificial Sequence: Syntheticoligonucleotide
  misc_feature 1..25: note = Description of Combined DNA/RNA Molecule: Syntheticoligonucleotide
  source 1..25: mol_type = other DNA
  modified_base order(5,6,7,8,15,17): mod_base = OTHER; note = Uracil
aagattttaacaagtataaaaaatt

SEQ ID NO: 1098 - DNA, 25 bp, synthetic construct
  misc_feature 1..25: note = Description of Artificial Sequence: Syntheticoligonucleotide
  misc_feature 1..25: note = Description of Combined DNA/RNA Molecule: Syntheticoligonucleotide
  source 1..25: mol_type = other DNA
  modified_base order(4,5,6,7,14,16,23): mod_base = OTHER; note = Uracil
agattttaacaagtataaaaaattc

SEQ ID NO: 1099 - DNA, 25 bp, synthetic construct
  misc_feature 1..25: note = Description of Artificial Sequence: Syntheticoligonucleotide
  misc_feature 1..25: note = Description of Combined DNA/RNA Molecule: Syntheticoligonucleotide
  source 1..25: mol_type = other DNA
  modified_base order(3,4,5,6,13,15,22,23): mod_base = OTHER; note = Uracil
gattttaacaagtataaaaaattct

SEQ ID NO: 1100 - DNA, 25 bp, synthetic construct
  misc_feature 1..25: note = Description of Artificial Sequence: Syntheticoligonucleotide
  misc_feature 1..25: note = Description of Artificial Sequence: Syntheticoligonucleotide
  source 1..25: mol_type = other DNA
  modified_base order(2,3,4,5,12,14,21,22): mod_base = OTHER; note = Uracil
attttaacaagtataaaaaattctc

SEQ ID NO: 1101 - RNA, 25 nt, synthetic construct
  misc_feature 1..25: note = Description of Artificial Sequence: Syntheticoligonucleotide
  source 1..25: mol_type = other RNA
ttttaacaagtataaaaaattctca

SEQ ID NO: 1102 - DNA, 25 bp, synthetic construct
  misc_feature 1..25: note = Description of Artificial Sequence: Syntheticoligonucleotide
  misc_feature 1..25: note = Description of Combined DNA/RNA Molecule: Syntheticoligonucleotide
  source 1..25: mol_type = other DNA
  modified_base order(4,6,13,14,16,19): mod_base = OTHER; note = Uracil
aagtataaaaaattctcataggaat

SEQ ID NO: 1103 - DNA, 25 bp, synthetic construct
  misc_feature 1..25: note = Description of Artificial Sequence: Syntheticoligonucleotide
  misc_feature 1..25: note = Description of Combined DNA/RNA Molecule: Syntheticoligonucleotide
  source 1..25: mol_type = other DNA
  modified_base order(3,5,12,13,15,18): mod_base = OTHER; note = Uracil
agtataaaaaattctcataggaatt

SEQ ID NO: 1104 - DNA, 25 bp, synthetic construct
  misc_feature 1..25: note = Description of Artificial Sequence: Syntheticoligonucleotide
  misc_feature 1..25: note = Description of Combined DNA/RNA Molecule: Syntheticoligonucleotide
  source 1..25: mol_type = other DNA
  modified_base order(2,4,11,12,14,17,23): mod_base = OTHER; note = Uracil
gtataaaaaattctcataggaatta

SEQ ID NO: 1105 - RNA, 25 nt, synthetic construct
  misc_feature 1..25: note = Description of Artificial Sequence: Syntheticoligonucleotide
  source 1..25: mol_type = other RNA
tataaaaaattctcataggaattaa

SEQ ID NO: 1106 - RNA, 25 nt, synthetic construct
  misc_feature 1..25: note = Description of Artificial Sequence: Syntheticoligonucleotide
  source 1..25: mol_type = other RNA
ataaaaaattctcataggaattaaa

SEQ ID NO: 1107 - DNA, 25 bp, synthetic construct
  misc_feature 1..25: note = Description of Artificial Sequence: Syntheticoligonucleotide
  misc_feature 1..25: note = Description of Combined DNA/RNA Molecule: Syntheticoligonucleotide
  source 1..25: mol_type = other DNA
  modified_base order(1,8,9,11,14,20,21): mod_base = OTHER; note = Uracil
taaaaaattctcataggaattaaat

SEQ ID NO: 1108 - DNA, 25 bp, synthetic construct
  misc_feature 1..25: note = Description of Artificial Sequence: Syntheticoligonucleotide
  misc_feature 1..25: note = Description of Combined DNA/RNA Molecule: Syntheticoligonucleotide
  source 1..25: mol_type = other DNA
  modified_base order(7,8,10,13,19,20): mod_base = OTHER; note = Uracil
aaaaaattctcataggaattaaatg

SEQ ID NO: 1109 - DNA, 25 bp, synthetic construct
  misc_feature 1..25: note = Description of Artificial Sequence: Syntheticoligonucleotide
  misc_feature 1..25: note = Description of Combined DNA/RNA Molecule: Syntheticoligonucleotide
  source 1..25: mol_type = other DNA
  modified_base order(6,7,9,12,18,19,23): mod_base = OTHER; note = Uracil
aaaaattctcataggaattaaatgt

SEQ ID NO: 1110 - RNA, 25 nt, synthetic construct
  misc_feature 1..25: note = Description of Artificial Sequence: Syntheticoligonucleotide
  source 1..25: mol_type = other RNA
aaattctcataggaattaaatgtag

SEQ ID NO: 1111 - DNA, 25 bp, synthetic construct
  misc_feature 1..25: note = Description of Artificial Sequence: Syntheticoligonucleotide
  misc_feature 1..25: note = Description of Combined DNA/RNA Molecule: Syntheticoligonucleotide
  source 1..25: mol_type = other DNA
  modified_base order(3,4,6,9,15,16,20,22): mod_base = OTHER; note = Uracil
aattctcataggaattaaatgtagt

SEQ ID NO: 1112 - DNA, 25 bp, synthetic construct
  misc_feature 1..25: note = Description of Artificial Sequence: Syntheticoligonucleotide
  misc_feature 1..25: note = Description of Combined DNA/RNA Molecule: Syntheticoligonucleotide
  source 1..25: mol_type = other DNA
  modified_base order(2,3,4,7,10,12,16,17,18,22): mod_base = OTHER; note = Uracil
ctttcatagtataactttaaatctt

SEQ ID NO: 1113 - DNA, 25 bp, synthetic construct
  misc_feature 1..25: note = Description of Artificial Sequence: Syntheticoligonucleotide
  misc_feature 1..25: note = Description of Combined DNA/RNA Molecule: Syntheticoligonucleotide
  source 1..25: mol_type = other DNA
  modified_base order(2,5,7,11,12,13,17,19,20,21,22): mod_base = OTHER; note = Uracil
atagtataactttaaatcttttctt

SEQ ID NO: 1114 - DNA, 25 bp, synthetic construct
  misc_feature 1..25: note = Description of Artificial Sequence: Syntheticoligonucleotide
  misc_feature 1..25: note = Description of Combined DNA/RNA Molecule: Syntheticoligonucleotide
  source 1..25: mol_type = other DNA
  modified_base order(1,4,6,10,11,12,16,18,19,20,21,23): mod_base = OTHER; note = Uracil
tagtataactttaaatcttttcttc

SEQ ID NO: 1115 - DNA, 25 bp, synthetic construct
  misc_feature 1..25: note = Description of Artificial Sequence: Syntheticoligonucleotide
  misc_feature 1..25: note = Description of Combined DNA/RNA Molecule: Syntheticoligonucleotide
  source 1..25: mol_type = other DNA
  modified_base order(1,5,7,8,9,10,12,13,18,19,23): mod_base = OTHER; note = Uracil
taaatcttttcttcaacttgagtct

SEQ ID NO: 1116 - DNA, 25 bp, synthetic construct
  misc_feature 1..25: note = Description of Artificial Sequence: Syntheticoligonucleotide
  misc_feature 1..25: note = Description of Combined DNA/RNA Molecule: Syntheticoligonucleotide
  source 1..25: mol_type = other DNA
  modified_base order(4,6,7,8,9,11,12,17,18,22): mod_base = OTHER; note = Uracil
aaatcttttcttcaacttgagtctt

SEQ ID NO: 1117 - RNA, 25 nt, synthetic construct
  misc_feature 1..25: note = Description of Artificial Sequence: Syntheticoligonucleotide
  source 1..25: mol_type = other RNA
cttgagtctttgaagatagttttaa

SEQ ID NO: 1118 - DNA, 25 bp, synthetic construct
  misc_feature 1..25: note = Description of Artificial Sequence: Syntheticoligonucleotide
  misc_feature 1..25: note = Description of Combined DNA/RNA Molecule: Syntheticoligonucleotide
  source 1..25: mol_type = other DNA
  modified_base order(1,5,7,8,9,15,18,19,20,21): mod_base = OTHER; note = Uracil
tgagtctttgaagatagttttaatt

SEQ ID NO: 1119 - DNA, 25 bp, synthetic construct
  misc_feature 1..25: note = Description of Artificial Sequence: Syntheticoligonucleotide
  misc_feature 1..25: note = Description of Combined DNA/RNA Molecule: Syntheticoligonucleotide
  source 1..25: mol_type = other DNA
  modified_base order(4,6,7,8,14,17,18,19,20,23): mod_base = OTHER; note = Uracil
gagtctttgaagatagttttaattc

SEQ ID NO: 1120 - RNA, 25 nt, synthetic construct
  misc_feature 1..25: note = Description of Artificial Sequence: Syntheticoligonucleotide
  source 1..25: mol_type = other RNA
gatagttttaattctgcttgtgaca

SEQ ID NO: 1121 - DNA, 25 bp, synthetic construct
  misc_feature 1..25: note = Description of Artificial Sequence: Syntheticoligonucleotide
  misc_feature 1..25: note = Description of Combined DNA/RNA Molecule: Syntheticoligonucleotide
  source 1..25: mol_type = other DNA
  modified_base order(2,5,6,7,8,11,12,14,17,18,20): mod_base = OTHER; note = Uracil
atagttttaattctgcttgtgacat

SEQ ID NO: 1122 - DNA, 25 bp, synthetic construct
  misc_feature 1..25: note = Description of Artificial Sequence: Syntheticoligonucleotide
  misc_feature 1..25: note = Description of Combined DNA/RNA Molecule: Syntheticoligonucleotide
  source 1..25: mol_type = other DNA
  modified_base order(1,4,5,6,7,10,11,13,16,17,19): mod_base = OTHER; note = Uracil
tagttttaattctgcttgtgacatt

SEQ ID NO: 1123 - RNA, 25 nt, synthetic construct
  misc_feature 1..25: note = Description of Artificial Sequence: Syntheticoligonucleotide
  source 1..25: mol_type = other RNA
cttgtgacattaaaagattatttgg

SEQ ID NO: 1124 - RNA, 25 nt, synthetic construct
  misc_feature 1..25: note = Description of Artificial Sequence: Syntheticoligonucleotide
  source 1..25: mol_type = other RNA
cattgcttttgtttcttaagaaaac

SEQ ID NO: 1125 - RNA, 25 nt, synthetic construct
  misc_feature 1..25: note = Description of Artificial Sequence: Syntheticoligonucleotide
  source 1..25: mol_type = other RNA
attgcttttgtttcttaagaaaaca

SEQ ID NO: 1126 - DNA, 25 bp, synthetic construct
  misc_feature 1..25: note = Description of Artificial Sequence: Syntheticoligonucleotide
  misc_feature 1..25: note = Description of Combined DNA/RNA Molecule: Syntheticoligonucleotide
  source 1..25: mol_type = other DNA
  modified_base order(1,2,3,5,6,7,9,10,23): mod_base = OTHER; note = Uracil
tttgtttcttaagaaaacaaactct

SEQ ID NO: 1127 - RNA, 25 nt, synthetic construct
  misc_feature 1..25: note = Description of Artificial Sequence: Syntheticoligonucleotide
  source 1..25: mol_type = other RNA
cttaagaaaacaaactcttttttaa

SEQ ID NO: 1128 - RNA, 25 nt, synthetic construct
  misc_feature 1..25: note = Description of Artificial Sequence: Syntheticoligonucleotide
  source 1..25: mol_type = other RNA
ttaagaaaacaaactcttttttaaa

SEQ ID NO: 1129 - RNA, 25 nt, synthetic construct
  misc_feature 1..25: note = Description of Artificial Sequence: Syntheticoligonucleotide
  source 1..25: mol_type = other RNA
taagaaaacaaactcttttttaaaa

SEQ ID NO: 1130 - RNA, 25 nt, synthetic construct
  misc_feature 1..25: note = Description of Artificial Sequence: Syntheticoligonucleotide
  source 1..25: mol_type = other RNA
aagaaaacaaactcttttttaaaaa

SEQ ID NO: 1131 - DNA, 25 bp, synthetic construct
  misc_feature 1..25: note = Description of Artificial Sequence: Syntheticoligonucleotide
  misc_feature 1..25: note = Description of Combined DNA/RNA Molecule: Syntheticoligonucleotide
  source 1..25: mol_type = other DNA
  modified_base order(12,14,15,16,17,18,19): mod_base = OTHER; note = Uracil
agaaaacaaactcttttttaaaaat

SEQ ID NO: 1132 - DNA, 25 bp, synthetic construct
  misc_feature 1..25: note = Description of Artificial Sequence: Syntheticoligonucleotide
  misc_feature 1..25: note = Description of Combined DNA/RNA Molecule: Syntheticoligonucleotide
  source 1..25: mol_type = other DNA
  modified_base order(11,13,14,15,16,17,18): mod_base = OTHER; note = Uracil
gaaaacaaactcttttttaaaaatt

SEQ ID NO: 1133 - DNA, 25 bp, synthetic construct
  misc_feature 1..25: note = Description of Artificial Sequence: Syntheticoligonucleotide
  misc_feature 1..25: note = Description of Combined DNA/RNA Molecule: Syntheticoligonucleotide
  source 1..25: mol_type = other DNA
  modified_base order(10,12,13,14,15,16,17,23): mod_base = OTHER; note = Uracil
aaaacaaactcttttttaaaaatta

SEQ ID NO: 1134 - DNA, 25 bp, synthetic construct
  misc_feature 1..25: note = Description of Artificial Sequence: Syntheticoligonucleotide
  misc_feature 1..25: note = Description of Combined DNA/RNA Molecule: Syntheticoligonucleotide
  source 1..25: mol_type = other DNA
  modified_base order(6,8,9,10,11,12,13,19,20,23): mod_base = OTHER; note = Uracil
caaactcttttttaaaaattacttt

SEQ ID NO: 1135 - DNA, 25 bp, synthetic construct
  misc_feature 1..25: note = Description of Artificial Sequence: Syntheticoligonucleotide
  misc_feature 1..25: note = Description of Combined DNA/RNA Molecule: Syntheticoligonucleotide
  source 1..25: mol_type = other DNA
  modified_base order(2,3,4,5,6,7,13,14,17,18,19,20): mod_base = OTHER; note = Uracil
cttttttaaaaattacttttaaata

SEQ ID NO: 1136 - DNA, 25 bp, synthetic construct
  misc_feature 1..25: note = Description of Artificial Sequence: Syntheticoligonucleotide
  misc_feature 1..25: note = Description of Combined DNA/RNA Molecule: Syntheticoligonucleotide
  source 1..25: mol_type = other DNA
  modified_base order(1,2,3,4,5,6,12,13,16,17,18,19,23): mod_base = OTHER; note = Uracil
ttttttaaaaattacttttaaatat

SEQ ID NO: 1137 - DNA, 25 bp, synthetic construct
  misc_feature 1..25: note = Description of Artificial Sequence: Syntheticoligonucleotide
  misc_feature 1..25: note = Description of Combined DNA/RNA Molecule: Syntheticoligonucleotide
  source 1..25: mol_type = other DNA
  modified_base order(1,2,3,4,5,11,12,15,16,17,18,22): mod_base = OTHER; note = Uracil
tttttaaaaattacttttaaatatt

SEQ ID NO: 1138 - DNA, 25 bp, synthetic construct
  misc_feature 1..25: note = Description of Artificial Sequence: Syntheticoligonucleotide
  misc_feature 1..25: note = Description of Combined DNA/RNA Molecule: Syntheticoligonucleotide
  source 1..25: mol_type = other DNA
  modified_base order(1,2,3,4,10,11,14,15,16,17,21,23): mod_base = OTHER; note = Uracil
ttttaaaaattacttttaaatatta

SEQ ID NO: 1139 - RNA, 25 nt, synthetic construct
  misc_feature 1..25: note = Description of Artificial Sequence: Syntheticoligonucleotide
  source 1..25: mol_type = other RNA
tttaaaaattacttttaaatattaa

SEQ ID NO: 1140 - RNA, 25 nt, synthetic construct
  misc_feature 1..25: note = Description of Artificial Sequence: Syntheticoligonucleotide
  source 1..25: mol_type = other RNA
ttaaaaattacttttaaatattaac

SEQ ID NO: 1141 - DNA, 25 bp, synthetic construct
  misc_feature 1..25: note = Description of Artificial Sequence: Syntheticoligonucleotide
  misc_feature 1..25: note = Description of Combined DNA/RNA Molecule: Syntheticoligonucleotide
  source 1..25: mol_type = other DNA
  modified_base order(1,7,8,11,12,13,14,18,20,21): mod_base = OTHER; note = Uracil
taaaaattacttttaaatattaact

SEQ ID NO: 1142 - DNA, 25 bp, synthetic construct
  misc_feature 1..25: note = Description of Artificial Sequence: Syntheticoligonucleotide
  misc_feature 1..25: note = Description of Combined DNA/RNA Molecule: Syntheticoligonucleotide
  source 1..25: mol_type = other DNA
  modified_base order(6,7,10,11,12,13,17,19,20): mod_base = OTHER; note = Uracil
aaaaattacttttaaatattaactc

SEQ ID NO: 1143 - RNA, 25 nt, synthetic construct
  misc_feature 1..25: note = Description of Artificial Sequence: Syntheticoligonucleotide
  source 1..25: mol_type = other RNA
aaaattacttttaaatattaactca

SEQ ID NO: 1144 - DNA, 25 bp, synthetic construct
  misc_feature 1..25: note = Description of Artificial Sequence: Syntheticoligonucleotide
  misc_feature 1..25: note = Description of Combined DNA/RNA Molecule: Syntheticoligonucleotide
  source 1..25: mol_type = other DNA
  modified_base order(2,3,4,5,9,11,12,16,23): mod_base = OTHER; note = Uracil
cttttaaatattaactcaaaagttg

SEQ ID NO: 1145 - RNA, 25 nt, synthetic construct
  misc_feature 1..25: note = Description of Artificial Sequence: Syntheticoligonucleotide
  source 1..25: mol_type = other RNA
ttttaaatattaactcaaaagttga

SEQ ID NO: 1146 - RNA, 25 nt, synthetic construct
  misc_feature 1..25: note = Description of Artificial Sequence: Syntheticoligonucleotide
  source 1..25: mol_type = other RNA
ttaaatattaactcaaaagttgaga

SEQ ID NO: 1147 - DNA, 25 bp, synthetic construct
  misc_feature 1..25: note = Description of Artificial Sequence: Syntheticoligonucleotide
  misc_feature 1..25: note = Description of Combined DNA/RNA Molecule: Syntheticoligonucleotide
  source 1..25: mol_type = other DNA
  modified_base order(4,6,7,11,18,19): mod_base = OTHER; note = Uracil
aaatattaactcaaaagttgagatt

SEQ ID NO: 1148 - DNA, 25 bp, synthetic construct
  misc_feature 1..25: note = Description of Artificial Sequence: Syntheticoligonucleotide
  misc_feature 1..25: note = Description of Combined DNA/RNA Molecule: Syntheticoligonucleotide
  source 1..25: mol_type = other DNA
  modified_base order(3,5,6,10,17,18,23): mod_base = OTHER; note = Uracil
aatattaactcaaaagttgagattt

SEQ ID NO: 1149 - DNA, 25 bp, synthetic construct
  misc_feature 1..25: note = Description of Artificial Sequence: Syntheticoligonucleotide
  misc_feature 1..25: note = Description of Combined DNA/RNA Molecule: Syntheticoligonucleotide
  source 1..25: mol_type = other DNA
  modified_base order(2,4,5,9,16,17,22,23): mod_base = OTHER; note = Uracil
atattaactcaaaagttgagatttt

SEQ ID NO: 1150 - DNA, 25 bp, synthetic construct
  misc_feature 1..25: note = Description of Artificial Sequence: Syntheticoligonucleotide
  misc_feature 1..25: note = Description of Combined DNA/RNA Molecule: Syntheticoligonucleotide
  source 1..25: mol_type = other DNA
  modified_base order(1,3,4,8,15,16,21,22,23): mod_base = OTHER; note = Uracil
tattaactcaaaagttgagattttg

SEQ ID NO: 1151 - DNA, 25 bp, synthetic construct
  misc_feature 1..25: note = Description of Artificial Sequence: Syntheticoligonucleotide
  misc_feature 1..25: note = Description of Combined DNA/RNA Molecule: Syntheticoligonucleotide
  source 1..25: mol_type = other DNA
  modified_base order(1,3,13,14,17,18,19,20,21,22,23): mod_base = OTHER; note = Uracil
tgtgccaagacattaattttttttt

SEQ ID NO: 1152 - RNA, 25 nt, synthetic construct
  misc_feature 1..25: note = Description of Artificial Sequence: Syntheticoligonucleotide
  source 1..25: mol_type = other RNA
caagacattaattttttttttaaac

SEQ ID NO: 1153 - RNA, 25 nt, synthetic construct
  misc_feature 1..25: note = Description of Artificial Sequence: Syntheticoligonucleotide
  source 1..25: mol_type = other RNA
aagacattaattttttttttaaaca

SEQ ID NO: 1154 - RNA, 25 nt, synthetic construct
  misc_feature 1..25: note = Description of Artificial Sequence: Syntheticoligonucleotide
  source 1..25: mol_type = other RNA
ttaattttttttttaaacaatgaag

SEQ ID NO: 1155 - DNA, 25 bp, synthetic construct
  misc_feature 1..25: note = Description of Artificial Sequence: Syntheticoligonucleotide
  misc_feature 1..25: note = Description of Combined DNA/RNA Molecule: Syntheticoligonucleotide
  source 1..25: mol_type = other DNA
  modified_base order(1,4,5,6,7,8,9,10,11,12,13,20): mod_base = OTHER; note = Uracil
taattttttttttaaacaatgaagt

SEQ ID NO: 1156 - RNA, 25 nt, synthetic construct
  misc_feature 1..25: note = Description of Artificial Sequence: Syntheticoligonucleotide
  source 1..25: mol_type = other RNA
attttttttttaaacaatgaagtga

SEQ ID NO: 1157 - RNA, 25 nt, synthetic construct
  misc_feature 1..25: note = Description of Artificial Sequence: Syntheticoligonucleotide
  source 1..25: mol_type = other RNA
tttttttttaaacaatgaagtgaaa

SEQ ID NO: 1158 - RNA, 25 nt, synthetic construct
  misc_feature 1..25: note = Description of Artificial Sequence: Syntheticoligonucleotide
  source 1..25: mol_type = other RNA
ttttttttaaacaatgaagtgaaaa

SEQ ID NO: 1159 - RNA, 25 nt, synthetic construct
  misc_feature 1..25: note = Description of Artificial Sequence: Syntheticoligonucleotide
  source 1..25: mol_type = other RNA
tttttttaaacaatgaagtgaaaaa

SEQ ID NO: 1160 - RNA, 25 nt, synthetic construct
  misc_feature 1..25: note = Description of Artificial Sequence: Syntheticoligonucleotide
  source 1..25: mol_type = other RNA
ttttttaaacaatgaagtgaaaaag

SEQ ID NO: 1161 - DNA, 25 bp, synthetic construct
  misc_feature 1..25: note = Description of Artificial Sequence: Syntheticoligonucleotide
  misc_feature 1..25: note = Description of Combined DNA/RNA Molecule: Syntheticoligonucleotide
  source 1..25: mol_type = other DNA
  modified_base order(1,2,3,4,5,12,17): mod_base = OTHER; note = Uracil
tttttaaacaatgaagtgaaaaagt

SEQ ID NO: 1162 - DNA, 25 bp, synthetic construct
  misc_feature 1..25: note = Description of Artificial Sequence: Syntheticoligonucleotide
  misc_feature 1..25: note = Description of Combined DNA/RNA Molecule: Syntheticoligonucleotide
  source 1..25: mol_type = other DNA
  modified_base order(1,2,3,10,15,23): mod_base = OTHER; note = Uracil
tttaaacaatgaagtgaaaaagttt

SEQ ID NO: 1163 - DNA, 25 bp, synthetic construct
  misc_feature 1..25: note = Description of Artificial Sequence: Syntheticoligonucleotide
  misc_feature 1..25: note = Description of Combined DNA/RNA Molecule: Syntheticoligonucleotide
  source 1..25: mol_type = other DNA
  modified_base order(1,2,9,14,22,23): mod_base = OTHER; note = Uracil
ttaaacaatgaagtgaaaaagtttt

SEQ ID NO: 1164 - DNA, 25 bp, synthetic construct
  misc_feature 1..25: note = Description of Artificial Sequence: Syntheticoligonucleotide
  misc_feature 1..25: note = Description of Combined DNA/RNA Molecule: Syntheticoligonucleotide
  source 1..25: mol_type = other DNA
  modified_base order(1,8,13,21,22,23): mod_base = OTHER; note = Uracil
taaacaatgaagtgaaaaagtttta

SEQ ID NO: 1165 - DNA, 25 bp, synthetic construct
  misc_feature 1..25: note = Description of Artificial Sequence: Syntheticoligonucleotide
  misc_feature 1..25: note = Description of Combined DNA/RNA Molecule: Syntheticoligonucleotide
  source 1..25: mol_type = other DNA
  modified_base order(5,13,14,15,16,21,23): mod_base = OTHER; note = Uracil
gaagtgaaaaagttttacaatctct

SEQ ID NO: 1166 - DNA, 25 bp, synthetic construct
  misc_feature 1..25: note = Description of Artificial Sequence: Syntheticoligonucleotide
  misc_feature 1..25: note = Description of Combined DNA/RNA Molecule: Syntheticoligonucleotide
  source 1..25: mol_type = other DNA
  modified_base order(7,8,9,10,15,17,19,23): mod_base = OTHER; note = Uracil
aaaaagttttacaatctctaggttt

SEQ ID NO: 1167 - DNA, 25 bp, synthetic construct
  misc_feature 1..25: note = Description of Artificial Sequence: Syntheticoligonucleotide
  misc_feature 1..25: note = Description of Combined DNA/RNA Molecule: Syntheticoligonucleotide
  source 1..25: mol_type = other DNA
  modified_base order(6,7,8,9,14,16,18,22,23): mod_base = OTHER; note = Uracil
aaaagttttacaatctctaggtttg

SEQ ID NO: 1168 - RNA, 25 nt, synthetic construct
  misc_feature 1..25: note = Description of Artificial Sequence: Syntheticoligonucleotide
  source 1..25: mol_type = other RNA
aaagttttacaatctctaggtttgg

SEQ ID NO: 1169 - RNA, 25 nt, synthetic construct
  misc_feature 1..25: note = Description of Artificial Sequence: Syntheticoligonucleotide
  source 1..25: mol_type = other RNA
tggttaaattaacattgcataaaca

SEQ ID NO: 1170 - RNA, 25 nt, synthetic construct
  misc_feature 1..25: note = Description of Artificial Sequence: Syntheticoligonucleotide
  source 1..25: mol_type = other RNA
ggttaaattaacattgcataaacac

SEQ ID NO: 1171 - DNA, 25 bp, synthetic construct
  misc_feature 1..25: note = Description of Artificial Sequence: Syntheticoligonucleotide
  misc_feature 1..25: note = Description of Combined DNA/RNA Molecule: Syntheticoligonucleotide
  source 1..25: mol_type = other DNA
  modified_base order(2,3,7,8,13,14,18): mod_base = OTHER; note = Uracil
gttaaattaacattgcataaacact

SEQ ID NO: 1172 - DNA, 25 bp, synthetic construct
  misc_feature 1..25: note = Description of Artificial Sequence: Syntheticoligonucleotide
  misc_feature 1..25: note = Description of Combined DNA/RNA Molecule: Syntheticoligonucleotide
  source 1..25: mol_type = other DNA
  modified_base order(2,3,7,14,15,16,17,22): mod_base = OTHER; note = Uracil
attgcataaacacttttcaagtctg

SEQ ID NO: 1173 - RNA, 25 nt, synthetic construct
  misc_feature 1..25: note = Description of Artificial Sequence: Syntheticoligonucleotide
  source 1..25: mol_type = other RNA
aagtctgatccatatttaataatgc

SEQ ID NO: 1174 - RNA, 25 nt, synthetic construct
  misc_feature 1..25: note = Description of Artificial Sequence: Syntheticoligonucleotide
  source 1..25: mol_type = other RNA
catatttaataatgctttaaaataa

SEQ ID NO: 1175 - RNA, 25 nt, synthetic construct
  misc_feature 1..25: note = Description of Artificial Sequence: Syntheticoligonucleotide
  source 1..25: mol_type = other RNA
atatttaataatgctttaaaataaa

SEQ ID NO: 1176 - RNA, 25 nt, synthetic construct
  misc_feature 1..25: note = Description of Artificial Sequence: Syntheticoligonucleotide
  source 1..25: mol_type = other RNA
tatttaataatgctttaaaataaaa

SEQ ID NO: 1177 - RNA, 25 nt, synthetic construct
  misc_feature 1..25: note = Description of Artificial Sequence: Syntheticoligonucleotide
  source 1..25: mol_type = other RNA
atttaataatgctttaaaataaaaa

SEQ ID NO: 1178 - DNA, 25 bp, synthetic construct
  misc_feature 1..25: note = Description of Artificial Sequence: Syntheticoligonucleotide
  misc_feature 1..25: note = Description of Combined DNA/RNA Molecule: Syntheticoligonucleotide
  source 1..25: mol_type = other DNA
  modified_base order(1,2,3,6,9,12,13,14,19): mod_base = OTHER; note = Uracil
tttaataatgctttaaaataaaaat

SEQ ID NO: 1179 - DNA, 25 bp, synthetic construct
  misc_feature 1..25: note = Description of Artificial Sequence: Syntheticoligonucleotide
  misc_feature 1..25: note = Description of Combined DNA/RNA Molecule: Syntheticoligonucleotide
  source 1..25: mol_type = other DNA
  modified_base order(1,2,5,8,11,12,13,18): mod_base = OTHER; note = Uracil
ttaataatgctttaaaataaaaata

SEQ ID NO: 1180 - RNA, 25 nt, synthetic construct
  misc_feature 1..25: note = Description of Artificial Sequence: Syntheticoligonucleotide
  source 1..25: mol_type = other RNA
aataatgctttaaaataaaaataaa

SEQ ID NO: 1181 - RNA, 25 nt, synthetic construct
  misc_feature 1..25: note = Description of Artificial Sequence: Syntheticoligonucleotide
  source 1..25: mol_type = other RNA
ataatgctttaaaataaaaataaaa

SEQ ID NO: 1182 - RNA, 25 nt, synthetic construct
  misc_feature 1..25: note = Description of Artificial Sequence: Syntheticoligonucleotide
  source 1..25: mol_type = other RNA
taatgctttaaaataaaaataaaaa

SEQ ID NO: 1183 - RNA, 25 nt, synthetic construct
  misc_feature 1..25: note = Description of Artificial Sequence: Syntheticoligonucleotide
  source 1..25: mol_type = other RNA
aatgctttaaaataaaaataaaaac

SEQ ID NO: 1184 - DNA, 25 bp, synthetic construct
  misc_feature 1..25: note = Description of Artificial Sequence: Syntheticoligonucleotide
  misc_feature 1..25: note = Description of Combined DNA/RNA Molecule: Syntheticoligonucleotide
  source 1..25: mol_type = other DNA
  modified_base order(1,6,12,21): mod_base = OTHER; note = Uracil
taaaataaaaataaaaacaatcctt

SEQ ID NO: 1185 - DNA, 25 bp, synthetic construct
  misc_feature 1..25: note = Description of Artificial Sequence: Syntheticoligonucleotide
  misc_feature 1..25: note = Description of Combined DNA/RNA Molecule: Syntheticoligonucleotide
  source 1..25: mol_type = other DNA
  modified_base order(6,15,18,19,20,21): mod_base = OTHER; note = Uracil
aaaaataaaaacaatccttttgata

SEQ ID NO: 1186 - RNA, 25 nt, synthetic construct
  misc_feature 1..25: note = Description of Artificial Sequence: Syntheticoligonucleotide
  source 1..25: mol_type = other RNA
aaaataaaaacaatccttttgataa

SEQ ID NO: 1187 - RNA, 25 nt, synthetic construct
  misc_feature 1..25: note = Description of Artificial Sequence: Syntheticoligonucleotide
  source 1..25: mol_type = other RNA
aaataaaaacaatccttttgataaa

SEQ ID NO: 1188 - DNA, 25 bp, synthetic construct
  misc_feature 1..25: note = Description of Artificial Sequence: Syntheticoligonucleotide
  misc_feature 1..25: note = Description of Combined DNA/RNA Molecule: Syntheticoligonucleotide
  source 1..25: mol_type = other DNA
  modified_base order(3,12,15,16,17,18,21): mod_base = OTHER; note = Uracil
aataaaaacaatccttttgataaat

SEQ ID NO: 1189 - DNA, 25 bp, synthetic construct
  misc_feature 1..25: note = Description of Artificial Sequence: Syntheticoligonucleotide
  misc_feature 1..25: note = Description of Combined DNA/RNA Molecule: Syntheticoligonucleotide
  source 1..25: mol_type = other DNA
  modified_base order(2,11,14,15,16,17,20): mod_base = OTHER; note = Uracil
ataaaaacaatccttttgataaatt

SEQ ID NO: 1190 - DNA, 25 bp, synthetic construct
  misc_feature 1..25: note = Description of Artificial Sequence: Syntheticoligonucleotide
  misc_feature 1..25: note = Description of Combined DNA/RNA Molecule: Syntheticoligonucleotide
  source 1..25: mol_type = other DNA
  modified_base order(1,10,13,14,15,16,19,23): mod_base = OTHER; note = Uracil
taaaaacaatccttttgataaattt

SEQ ID NO: 1191 - DNA, 25 bp, synthetic construct
  misc_feature 1..25: note = Description of Artificial Sequence: Syntheticoligonucleotide
  misc_feature 1..25: note = Description of Combined DNA/RNA Molecule: Syntheticoligonucleotide
  source 1..25: mol_type = other DNA
  modified_base order(9,12,13,14,15,18,22,23): mod_base = OTHER; note = Uracil
aaaaacaatccttttgataaattta

SEQ ID NO: 1192 - RNA, 25 nt, synthetic construct
  misc_feature 1..25: note = Description of Artificial Sequence: Syntheticoligonucleotide
  source 1..25: mol_type = other RNA
aaaacaatccttttgataaatttaa

SEQ ID NO: 1193 - DNA, 25 bp, synthetic construct
  misc_feature 1..25: note = Description of Artificial Sequence: Syntheticoligonucleotide
  misc_feature 1..25: note = Description of Combined DNA/RNA Molecule: Syntheticoligonucleotide
  source 1..25: mol_type = other DNA
  modified_base order(4,7,8,9,10,13,17,18,19): mod_base = OTHER; note = Uracil
caatccttttgataaatttaaaatg

SEQ ID NO: 1194 - DNA, 25 bp, synthetic construct
  misc_feature 1..25: note = Description of Artificial Sequence: Syntheticoligonucleotide
  misc_feature 1..25: note = Description of Combined DNA/RNA Molecule: Syntheticoligonucleotide
  source 1..25: mol_type = other DNA
  modified_base order(2,3,4,5,8,12,13,14,19,21,22): mod_base = OTHER; note = Uracil
cttttgataaatttaaaatgttact

SEQ ID NO: 1195 - DNA, 25 bp, synthetic construct
  misc_feature 1..25: note = Description of Artificial Sequence: Syntheticoligonucleotide
  misc_feature 1..25: note = Description of Combined DNA/RNA Molecule: Syntheticoligonucleotide
  source 1..25: mol_type = other DNA
  modified_base order(1,2,3,4,7,11,12,13,18,20,21): mod_base = OTHER; note = Uracil
ttttgataaatttaaaatgttactt

SEQ ID NO: 1196 - DNA, 25 bp, synthetic construct
  misc_feature 1..25: note = Description of Artificial Sequence: Syntheticoligonucleotide
  misc_feature 1..25: note = Description of Combined DNA/RNA Molecule: Syntheticoligonucleotide
  source 1..25: mol_type = other DNA
  modified_base order(1,2,3,6,10,11,12,17,19,20,23): mod_base = OTHER; note = Uracil
tttgataaatttaaaatgttactta

SEQ ID NO: 1197 - DNA, 25 bp, synthetic construct
  misc_feature 1..25: note = Description of Artificial Sequence: Syntheticoligonucleotide
  misc_feature 1..25: note = Description of Combined DNA/RNA Molecule: Syntheticoligonucleotide
  source 1..25: mol_type = other DNA
  modified_base order(2,6,7,8,13,15,16,19,20,22,23): mod_base = OTHER; note = Uracil
ataaatttaaaatgttacttatttt

SEQ ID NO: 1198 - DNA, 25 bp, synthetic construct
  misc_feature 1..25: note = Description of Artificial Sequence: Syntheticoligonucleotide
  misc_feature 1..25: note = Description of Combined DNA/RNA Molecule: Syntheticoligonucleotide
  source 1..25: mol_type = other DNA
  modified_base order(1,5,6,7,12,14,15,18,19,21,22,23): mod_base = OTHER; note = Uracil
taaatttaaaatgttacttatttta

SEQ ID NO: 1199 - RNA, 25 nt, synthetic construct
  misc_feature 1..25: note = Description of Artificial Sequence: Syntheticoligonucleotide
  source 1..25: mol_type = other RNA
aaatttaaaatgttacttattttaa

SEQ ID NO: 1200 - RNA, 25 nt, synthetic construct
  misc_feature 1..25: note = Description of Artificial Sequence: Syntheticoligonucleotide
  source 1..25: mol_type = other RNA
aatttaaaatgttacttattttaaa

SEQ ID NO: 1201 - RNA, 25 nt, synthetic construct
  misc_feature 1..25: note = Description of Artificial Sequence: Syntheticoligonucleotide
  source 1..25: mol_type = other RNA
atttaaaatgttacttattttaaaa

SEQ ID NO: 1202 - DNA, 25 bp, synthetic construct
  misc_feature 1..25: note = Description of Artificial Sequence: Syntheticoligonucleotide
  misc_feature 1..25: note = Description of Combined DNA/RNA Molecule: Syntheticoligonucleotide
  source 1..25: mol_type = other DNA
  modified_base order(1,2,3,8,10,11,14,15,17,18,19,20): mod_base = OTHER; note = Uracil
tttaaaatgttacttattttaaaat

SEQ ID NO: 1203 - RNA, 25 nt, synthetic construct
  misc_feature 1..25: note = Description of Artificial Sequence: Syntheticoligonucleotide
  source 1..25: mol_type = other RNA
taaaatgttacttattttaaaataa

SEQ ID NO: 1204 - RNA, 25 nt, synthetic construct
  misc_feature 1..25: note = Description of Artificial Sequence: Syntheticoligonucleotide
  source 1..25: mol_type = other RNA
aaaatgttacttattttaaaataaa

SEQ ID NO: 1205 - DNA, 25 bp, synthetic construct
  misc_feature 1..25: note = Description of Artificial Sequence: Syntheticoligonucleotide
  misc_feature 1..25: note = Description of Combined DNA/RNA Molecule: Syntheticoligonucleotide
  source 1..25: mol_type = other DNA
  modified_base order(4,6,7,10,11,13,14,15,16,21): mod_base = OTHER; note = Uracil
aaatgttacttattttaaaataaat

SEQ ID NO: 1206 - DNA, 25 bp, synthetic construct
  misc_feature 1..25: note = Description of Artificial Sequence: Syntheticoligonucleotide
  misc_feature 1..25: note = Description of Combined DNA/RNA Molecule: Syntheticoligonucleotide
  source 1..25: mol_type = other DNA
  modified_base order(3,5,6,9,10,12,13,14,15,20): mod_base = OTHER; note = Uracil
aatgttacttattttaaaataaatg

SEQ ID NO: 1207 - RNA, 25 nt, synthetic construct
  misc_feature 1..25: note = Description of Artificial Sequence: Syntheticoligonucleotide
  source 1..25: mol_type = other RNA
atgttacttattttaaaataaatga

SEQ ID NO: 1208 - RNA, 25 nt, synthetic construct
  misc_feature 1..25: note = Description of Artificial Sequence: Syntheticoligonucleotide
  source 1..25: mol_type = other RNA
gttacttattttaaaataaatgaag

SEQ ID NO: 1209 - RNA, 25 nt, synthetic construct
  misc_feature 1..25: note = Description of Artificial Sequence: Syntheticoligonucleotide
  source 1..25: mol_type = other RNA
ttattttaaaataaatgaagtgaga

SEQ ID NO: 1210 - DNA, 25 bp, synthetic construct
  misc_feature 1..25: note = Description of Artificial Sequence: Syntheticoligonucleotide
  misc_feature 1..25: note = Description of Combined DNA/RNA Molecule: Syntheticoligonucleotide
  source 1..25: mol_type = other DNA
  modified_base order(2,3,4,5,10,14,19): mod_base = OTHER; note = Uracil
attttaaaataaatgaagtgagatg

SEQ ID NO: 1211 - RNA, 25 nt, synthetic construct
  misc_feature 1..25: note = Description of Artificial Sequence: Syntheticoligonucleotide
  source 1..25: mol_type = other RNA
ttttaaaataaatgaagtgagatgg

SEQ ID NO: 1212 - DNA, 25 bp, synthetic construct
  misc_feature 1..25: note = Description of Artificial Sequence: Syntheticoligonucleotide
  misc_feature 1..25: note = Description of Combined DNA/RNA Molecule: Syntheticoligonucleotide
  source 1..25: mol_type = other DNA
  modified_base order(1,6,10,15,20): mod_base = OTHER; note = Uracil
taaaataaatgaagtgagatggcat

SEQ ID NO: 1213 - DNA, 25 bp, synthetic construct
  misc_feature 1..25: note = Description of Artificial Sequence: Syntheticoligonucleotide
  misc_feature 1..25: note = Description of Combined DNA/RNA Molecule: Syntheticoligonucleotide
  source 1..25: mol_type = other DNA
  modified_base order(5,9,14,19): mod_base = OTHER; note = Uracil
aaaataaatgaagtgagatggcatg

SEQ ID NO: 1214 - RNA, 25 nt, synthetic construct
  misc_feature 1..25: note = Description of Artificial Sequence: Syntheticoligonucleotide
  source 1..25: mol_type = other RNA
catttcttcatgttaaaagaagtca

SEQ ID NO: 1215 - DNA, 25 bp, synthetic construct
  misc_feature 1..25: note = Description of Artificial Sequence: Syntheticoligonucleotide
  misc_feature 1..25: note = Description of Combined DNA/RNA Molecule: Syntheticoligonucleotide
  source 1..25: mol_type = other DNA
  modified_base order(2,3,4,6,7,10,12,13,22): mod_base = OTHER; note = Uracil
atttcttcatgttaaaagaagtcat

SEQ ID NO: 1216 - RNA, 25 nt, synthetic construct
  misc_feature 1..25: note = Description of Artificial Sequence: Syntheticoligonucleotide
  source 1..25: mol_type = other RNA
caaactcttagttttttttttttac

SEQ ID NO: 1217 - RNA, 25 nt, synthetic construct
  misc_feature 1..25: note = Description of Artificial Sequence: Syntheticoligonucleotide
  source 1..25: mol_type = other RNA
gttttttttttttacaactatgtaa

SEQ ID NO: 1218 - DNA, 25 bp, synthetic construct
  misc_feature 1..25: note = Description of Artificial Sequence: Syntheticoligonucleotide
  misc_feature 1..25: note = Description of Combined DNA/RNA Molecule: Syntheticoligonucleotide
  source 1..25: mol_type = other DNA
  modified_base order(1,2,3,4,5,6,7,8,9,10,11,12,18,20,22): mod_base = OTHER; note = Uracil
ttttttttttttacaactatgtaat

SEQ ID NO: 1219 - DNA, 25 bp, synthetic construct
  misc_feature 1..25: note = Description of Artificial Sequence: Syntheticoligonucleotide
  misc_feature 1..25: note = Description of Combined DNA/RNA Molecule: Syntheticoligonucleotide
  source 1..25: mol_type = other DNA
  modified_base order(1,2,3,4,5,6,7,8,9,10,11,17,19,21): mod_base = OTHER; note = Uracil
tttttttttttacaactatgtaatt

SEQ ID NO: 1220 - DNA, 25 bp, synthetic construct
  misc_feature 1..25: note = Description of Artificial Sequence: Syntheticoligonucleotide
  misc_feature 1..25: note = Description of Combined DNA/RNA Molecule: Syntheticoligonucleotide
  source 1..25: mol_type = other DNA
  modified_base order(1,2,3,4,5,6,7,8,9,10,16,18,20,23): mod_base = OTHER; note = Uracil
ttttttttttacaactatgtaattt

SEQ ID NO: 1221 - DNA, 25 bp, synthetic construct
  misc_feature 1..25: note = Description of Artificial Sequence: Syntheticoligonucleotide
  misc_feature 1..25: note = Description of Combined DNA/RNA Molecule: Syntheticoligonucleotide
  source 1..25: mol_type = other DNA
  modified_base order(1,2,3,4,5,6,7,8,9,15,17,19,22,23): mod_base = OTHER; note = Uracil
tttttttttacaactatgtaattta

SEQ ID NO: 1222 - DNA, 25 bp, synthetic construct
  misc_feature 1..25: note = Description of Artificial Sequence: Syntheticoligonucleotide
  misc_feature 1..25: note = Description of Combined DNA/RNA Molecule: Syntheticoligonucleotide
  source 1..25: mol_type = other DNA
  modified_base order(1,2,3,4,5,6,7,8,14,16,18,21,22,23): mod_base = OTHER; note = Uracil
ttttttttacaactatgtaatttat

SEQ ID NO: 1223 - DNA, 25 bp, synthetic construct
  misc_feature 1..25: note = Description of Artificial Sequence: Syntheticoligonucleotide
  misc_feature 1..25: note = Description of Combined DNA/RNA Molecule: Syntheticoligonucleotide
  source 1..25: mol_type = other DNA
  modified_base order(1,2,3,4,5,6,7,13,15,17,20,21,22): mod_base = OTHER; note = Uracil
tttttttacaactatgtaatttata

SEQ ID NO: 1224 - DNA, 25 bp, synthetic construct
  misc_feature 1..25: note = Description of Artificial Sequence: Syntheticoligonucleotide
  misc_feature 1..25: note = Description of Combined DNA/RNA Molecule: Syntheticoligonucleotide
  source 1..25: mol_type = other DNA
  modified_base order(1,2,3,4,5,6,12,14,16,19,20,21,23): mod_base = OTHER; note = Uracil
ttttttacaactatgtaatttatat

SEQ ID NO: 1225 - DNA, 25 bp, synthetic construct
  misc_feature 1..25: note = Description of Artificial Sequence: Syntheticoligonucleotide
  misc_feature 1..25: note = Description of Combined DNA/RNA Molecule: Syntheticoligonucleotide
  source 1..25: mol_type = other DNA
  modified_base order(1,2,3,4,5,11,13,15,18,19,20,22): mod_base = OTHER; note = Uracil
tttttacaactatgtaatttatatt

SEQ ID NO: 1226 - DNA, 25 bp, synthetic construct
  misc_feature 1..25: note = Description of Artificial Sequence: Syntheticoligonucleotide
  misc_feature 1..25: note = Description of Combined DNA/RNA Molecule: Syntheticoligonucleotide
  source 1..25: mol_type = other DNA
  modified_base order(1,2,3,4,10,12,14,17,18,19,21,23): mod_base = OTHER; note = Uracil
ttttacaactatgtaatttatattc

SEQ ID NO: 1227 - RNA, 25 nt, synthetic construct
  misc_feature 1..25: note = Description of Artificial Sequence: Syntheticoligonucleotide
  source 1..25: mol_type = other RNA
tttacaactatgtaatttatattcc

SEQ ID NO: 1228 - RNA, 25 nt, synthetic construct
  misc_feature 1..25: note = Description of Artificial Sequence: Syntheticoligonucleotide
  source 1..25: mol_type = other RNA
ctatgtaatttatattccatttaca

SEQ ID NO: 1229 - DNA, 25 bp, synthetic construct
  misc_feature 1..25: note = Description of Artificial Sequence: Syntheticoligonucleotide
  misc_feature 1..25: note = Description of Combined DNA/RNA Molecule: Syntheticoligonucleotide
  source 1..25: mol_type = other DNA
  modified_base order(1,3,5,8,9,10,12,14,15,19,20,21): mod_base = OTHER; note = Uracil
tatgtaatttatattccatttacat

SEQ ID NO: 1230 - DNA, 25 bp, synthetic construct
  misc_feature 1..25: note = Description of Artificial Sequence: Syntheticoligonucleotide
  misc_feature 1..25: note = Description of Combined DNA/RNA Molecule: Syntheticoligonucleotide
  source 1..25: mol_type = other DNA
  modified_base order(2,4,7,8,9,11,13,14,18,19,20): mod_base = OTHER; note = Uracil
atgtaatttatattccatttacata

SEQ ID NO: 1231 - DNA, 25 bp, synthetic construct
  misc_feature 1..25: note = Description of Artificial Sequence: Syntheticoligonucleotide
  misc_feature 1..25: note = Description of Combined DNA/RNA Molecule: Syntheticoligonucleotide
  source 1..25: mol_type = other DNA
  modified_base order(1,2,3,5,7,8,12,13,14,18): mod_base = OTHER; note = Uracil
tttatattccatttacataaggata

SEQ ID NO: 1232 - RNA, 25 nt, synthetic construct
  misc_feature 1..25: note = Description of Artificial Sequence: Syntheticoligonucleotide
  source 1..25: mol_type = other RNA
ttatattccatttacataaggatac

SEQ ID NO: 1233 - RNA, 25 nt, synthetic construct
  misc_feature 1..25: note = Description of Artificial Sequence: Syntheticoligonucleotide
  source 1..25: mol_type = other RNA
tatattccatttacataaggataca

SEQ ID NO: 1234 - RNA, 25 nt, synthetic construct
  misc_feature 1..25: note = Description of Artificial Sequence: Syntheticoligonucleotide
  source 1..25: mol_type = other RNA
atattccatttacataaggatacac

SEQ ID NO: 1235 - RNA, 25 nt, synthetic construct
  misc_feature 1..25: note = Description of Artificial Sequence: Syntheticoligonucleotide
  source 1..25: mol_type = other RNA
cataaggatacacttatttgtcaag

SEQ ID NO: 1236 - RNA, 25 nt, synthetic construct
  misc_feature 1..25: note = Description of Artificial Sequence: Syntheticoligonucleotide
  source 1..25: mol_type = other RNA
aggatacacttatttgtcaagctca

SEQ ID NO: 1237 - RNA, 25 nt, synthetic construct
  misc_feature 1..25: note = Description of Artificial Sequence: Syntheticoligonucleotide
  source 1..25: mol_type = other RNA
ctgtaaatttttaacctatgttaca

SEQ ID NO: 1238 - RNA, 25 nt, synthetic construct
  misc_feature 1..25: note = Description of Artificial Sequence: Syntheticoligonucleotide
  source 1..25: mol_type = other RNA
tgtaaatttttaacctatgttacac

SEQ ID NO: 1239 - RNA, 25 nt, synthetic construct
  misc_feature 1..25: note = Description of Artificial Sequence: Syntheticoligonucleotide
  source 1..25: mol_type = other RNA
gtaaatttttaacctatgttacacc

SEQ ID NO: 1240 - DNA, 25 bp, synthetic construct
  misc_feature 1..25: note = Description of Artificial Sequence: Syntheticoligonucleotide
  misc_feature 1..25: note = Description of Combined DNA/RNA Molecule: Syntheticoligonucleotide
  source 1..25: mol_type = other DNA
  modified_base order(8,13,14,15,17,19,20,21): mod_base = OTHER; note = Uracil
caagaggtgaagtttatatttgaat

SEQ ID NO: 1241 - DNA, 25 bp, synthetic construct
  misc_feature 1..25: note = Description of Artificial Sequence: Syntheticoligonucleotide
  misc_feature 1..25: note = Description of Combined DNA/RNA Molecule: Syntheticoligonucleotide
  source 1..25: mol_type = other DNA
  modified_base order(6,11,12,13,15,17,18,19,23): mod_base = OTHER; note = Uracil
agaggtgaagtttatatttgaatat

SEQ ID NO: 1242 - DNA, 25 bp, synthetic construct
  misc_feature 1..25: note = Description of Artificial Sequence: Syntheticoligonucleotide
  misc_feature 1..25: note = Description of Combined DNA/RNA Molecule: Syntheticoligonucleotide
  source 1..25: mol_type = other DNA
  modified_base order(5,10,11,12,14,16,17,18,22): mod_base = OTHER; note = Uracil
gaggtgaagtttatatttgaatatc

SEQ ID NO: 1243 - RNA, 25 nt, synthetic construct
  misc_feature 1..25: note = Description of Artificial Sequence: Syntheticoligonucleotide
  source 1..25: mol_type = other RNA
ggtgaagtttatatttgaatatcca

SEQ ID NO: 1244 - DNA, 25 bp, synthetic construct
  misc_feature 1..25: note = Description of Artificial Sequence: Syntheticoligonucleotide
  misc_feature 1..25: note = Description of Combined DNA/RNA Molecule: Syntheticoligonucleotide
  source 1..25: mol_type = other DNA
  modified_base order(2,7,8,9,11,13,14,15,19,21): mod_base = OTHER; note = Uracil
gtgaagtttatatttgaatatccat

SEQ ID NO: 1245 - RNA, 25 nt, synthetic construct
  misc_feature 1..25: note = Description of Artificial Sequence: Syntheticoligonucleotide
  source 1..25: mol_type = other RNA
gtttatatttgaatatccattctcg

SEQ ID NO: 1246 - DNA, 25 bp, synthetic construct
  misc_feature 1..25: note = Description of Artificial Sequence: Syntheticoligonucleotide
  misc_feature 1..25: note = Description of Combined DNA/RNA Molecule: Syntheticoligonucleotide
  source 1..25: mol_type = other DNA
  modified_base order(1,2,5,10,11,12,13,16,19,20,22): mod_base = OTHER; note = Uracil
ttgatgcagttttaatacttgtaat

SEQ ID NO: 1247 - DNA, 25 bp, synthetic construct
  misc_feature 1..25: note = Description of Artificial Sequence: Syntheticoligonucleotide
  misc_feature 1..25: note = Description of Combined DNA/RNA Molecule: Syntheticoligonucleotide
  source 1..25: mol_type = other DNA
  modified_base order(3,8,9,10,11,14,17,18,20,23): mod_base = OTHER; note = Uracil
gatgcagttttaatacttgtaattc

SEQ ID NO: 1248 - RNA, 25 nt, synthetic construct
  misc_feature 1..25: note = Description of Artificial Sequence: Syntheticoligonucleotide
  source 1..25: mol_type = other RNA
tttgacctaatcactaattttcagg

SEQ ID NO: 1249 - RNA, 25 nt, synthetic construct
  misc_feature 1..25: note = Description of Artificial Sequence: Syntheticoligonucleotide
  source 1..25: mol_type = other RNA
ctaatcactaattttcaggtggtgg

SEQ ID NO: 1250 - RNA, 25 nt, synthetic construct
  misc_feature 1..25: note = Description of Artificial Sequence: Syntheticoligonucleotide
  source 1..25: mol_type = other RNA
gtaggatttttcaaacctggtatga

SEQ ID NO: 1251 - RNA, 25 nt, synthetic construct
  misc_feature 1..25: note = Description of Artificial Sequence: Syntheticoligonucleotide
  source 1..25: mol_type = other RNA
tggaaggagaatttaataaagatag

SEQ ID NO: 1252 - RNA, 25 nt, synthetic construct
  misc_feature 1..25: note = Description of Artificial Sequence: Syntheticoligonucleotide
  source 1..25: mol_type = other RNA
aaggagaatttaataaagatagtgc

SEQ ID NO: 1253 - DNA, 25 bp, synthetic construct
  misc_feature 1..25: note = Description of Artificial Sequence: Syntheticoligonucleotide
  misc_feature 1..25: note = Description of Combined DNA/RNA Molecule: Syntheticoligonucleotide
  source 1..25: mol_type = other DNA
  modified_base order(7,8,9,12,18,21): mod_base = OTHER; note = Uracil
ggagaatttaataaagatagtgctg

SEQ ID NO: 1254 - RNA, 25 nt, synthetic construct
  misc_feature 1..25: note = Description of Artificial Sequence: Syntheticoligonucleotide
  source 1..25: mol_type = other RNA
gagaatttaataaagatagtgctga

SEQ ID NO: 1255 - RNA, 25 nt, synthetic construct
  misc_feature 1..25: note = Description of Artificial Sequence: Syntheticoligonucleotide
  source 1..25: mol_type = other RNA
atttaataaagatagtgctgaaaga

SEQ ID NO: 1256 - DNA, 25 bp, synthetic construct
  misc_feature 1..25: note = Description of Artificial Sequence: Syntheticoligonucleotide
  misc_feature 1..25: note = Description of Combined DNA/RNA Molecule: Syntheticoligonucleotide
  source 1..25: mol_type = other DNA
  modified_base order(2,3,7,10,12,14,18): mod_base = OTHER; note = Uracil
cttaggtaatctataactaggacta

SEQ ID NO: 1257 - RNA, 25 nt, synthetic construct
  misc_feature 1..25: note = Description of Artificial Sequence: Syntheticoligonucleotide
  source 1..25: mol_type = other RNA
ttaggtaatctataactaggactac

SEQ ID NO: 1258 - DNA, 25 bp, synthetic construct
  misc_feature 1..25: note = Description of Artificial Sequence: Syntheticoligonucleotide
  misc_feature 1..25: note = Description of Combined DNA/RNA Molecule: Syntheticoligonucleotide
  source 1..25: mol_type = other DNA
  modified_base order(4,7,11,12,16,17,19,20,21,22): mod_base = OTHER; note = Uracil
cagtaatacattccattgttttagt

SEQ ID NO: 1259 - RNA, 25 nt, synthetic construct
  misc_feature 1..25: note = Description of Artificial Sequence: Syntheticoligonucleotide
  source 1..25: mol_type = other RNA
gtaatacattccattgttttagtaa

SEQ ID NO: 1260 - RNA, 25 nt, synthetic construct
  misc_feature 1..25: note = Description of Artificial Sequence: Syntheticoligonucleotide
  source 1..25: mol_type = other RNA
taatacattccattgttttagtaac

SEQ ID NO: 1261 - RNA, 25 nt, synthetic construct
  misc_feature 1..25: note = Description of Artificial Sequence: Syntheticoligonucleotide
  source 1..25: mol_type = other RNA
aatacattccattgttttagtaacc

SEQ ID NO: 1262 - DNA, 25 bp, synthetic construct
  misc_feature 1..25: note = Description of Artificial Sequence: Syntheticoligonucleotide
  misc_feature 1..25: note = Description of Combined DNA/RNA Molecule: Syntheticoligonucleotide
  source 1..25: mol_type = other DNA
  modified_base order(2,3,5,6,7,8,11,21,23): mod_base = OTHER; note = Uracil
attgttttagtaaccagaaatcttc

SEQ ID NO: 1263 - DNA, 25 bp, synthetic construct
  misc_feature 1..25: note = Description of Artificial Sequence: Syntheticoligonucleotide
  misc_feature 1..25: note = Description of Combined DNA/RNA Molecule: Syntheticoligonucleotide
  source 1..25: mol_type = other DNA
  modified_base order(7,9,10,13,18): mod_base = OTHER; note = Uracil
cagaaatcttcatgcaatgaaaaat

SEQ ID NO: 1264 - DNA, 25 bp, synthetic construct
  misc_feature 1..25: note = Description of Artificial Sequence: Syntheticoligonucleotide
  misc_feature 1..25: note = Description of Combined DNA/RNA Molecule: Syntheticoligonucleotide
  source 1..25: mol_type = other DNA
  modified_base order(3,8,15,18,19,20,23): mod_base = OTHER; note = Uracil
catgcaatgaaaaatactttaattc

SEQ ID NO: 1265 - RNA, 25 nt, synthetic construct
  misc_feature 1..25: note = Description of Artificial Sequence: Syntheticoligonucleotide
  source 1..25: mol_type = other RNA
tgaaaaatactttaattcatgaagc

SEQ ID NO: 1266 - DNA, 25 bp, synthetic construct
  misc_feature 1..25: note = Description of Artificial Sequence: Syntheticoligonucleotide
  misc_feature 1..25: note = Description of Combined DNA/RNA Molecule: Syntheticoligonucleotide
  source 1..25: mol_type = other DNA
  modified_base order(6,9,10,11,14,15,18): mod_base = OTHER; note = Uracil
aaaaatactttaattcatgaagctt

SEQ ID NO: 1267 - DNA, 25 bp, synthetic construct
  misc_feature 1..25: note = Description of Artificial Sequence: Syntheticoligonucleotide
  misc_feature 1..25: note = Description of Combined DNA/RNA Molecule: Syntheticoligonucleotide
  source 1..25: mol_type = other DNA
  modified_base order(5,8,9,10,13,14,17,23): mod_base = OTHER; note = Uracil
aaaatactttaattcatgaagctta

SEQ ID NO: 1268 - RNA, 25 nt, synthetic construct
  misc_feature 1..25: note = Description of Artificial Sequence: Syntheticoligonucleotide
  source 1..25: mol_type = other RNA
catgaagcttactttttttttttgg

SEQ ID NO: 1269 - DNA, 25 bp, synthetic construct
  misc_feature 1..25: note = Description of Artificial Sequence: Syntheticoligonucleotide
  misc_feature 1..25: note = Description of Combined DNA/RNA Molecule: Syntheticoligonucleotide
  source 1..25: mol_type = other DNA
  modified_base order(6,7,10,11,12,13,14,15,16,17,18,19,20,23): mod_base = OTHER; note = Uracil
gaagcttactttttttttttggtgt

SEQ ID NO: 1270 - RNA, 25 nt, synthetic construct
  misc_feature 1..25: note = Description of Artificial Sequence: Syntheticoligonucleotide
  source 1..25: mol_type = other RNA
cttactttttttttttggtgtcaga

SEQ ID NO: 1271 - DNA, 25 bp, synthetic construct
  misc_feature 1..25: note = Description of Artificial Sequence: Syntheticoligonucleotide
  misc_feature 1..25: note = Description of Combined DNA/RNA Molecule: Syntheticoligonucleotide
  source 1..25: mol_type = other DNA
  modified_base order(2,3,4,5,6,7,8,9,10,11,12,15,17,23): mod_base = OTHER; note = Uracil
ctttttttttttggtgtcagagtct

SEQ ID NO: 1272 - DNA, 25 bp, synthetic construct
  misc_feature 1..25: note = Description of Artificial Sequence: Syntheticoligonucleotide
  misc_feature 1..25: note = Description of Combined DNA/RNA Molecule: Syntheticoligonucleotide
  source 1..25: mol_type = other DNA
  modified_base order(1,2,3,4,5,6,7,8,9,10,11,14,16,22): mod_base = OTHER; note = Uracil
tttttttttttggtgtcagagtctc

SEQ ID NO: 1273 - RNA, 25 nt, synthetic construct
  misc_feature 1..25: note = Description of Artificial Sequence: Syntheticoligonucleotide
  source 1..25: mol_type = other RNA
ctaatttttgtatttttaggagaga

SEQ ID NO: 1274 - RNA, 25 nt, synthetic construct
  misc_feature 1..25: note = Description of Artificial Sequence: Syntheticoligonucleotide
  source 1..25: mol_type = other RNA
atttttgtatttttaggagagacgg

SEQ ID NO: 1275 - RNA, 25 nt, synthetic construct
  misc_feature 1..25: note = Description of Artificial Sequence: Syntheticoligonucleotide
  source 1..25: mol_type = other RNA
catttattcagcaaatatttattga

SEQ ID NO: 1276 - DNA, 25 bp, synthetic construct
  misc_feature 1..25: note = Description of Artificial Sequence: Syntheticoligonucleotide
  misc_feature 1..25: note = Description of Combined DNA/RNA Molecule: Syntheticoligonucleotide
  source 1..25: mol_type = other DNA
  modified_base order(1,2,3,5,6,14,16,17,18,20,21): mod_base = OTHER; note = Uracil
tttattcagcaaatatttattgagt

SEQ ID NO: 1277 - RNA, 25 nt, synthetic construct
  misc_feature 1..25: note = Description of Artificial Sequence: Syntheticoligonucleotide
  source 1..25: mol_type = other RNA
tattcagcaaatatttattgagtgc

SEQ ID NO: 1278 - DNA, 25 bp, synthetic construct
  misc_feature 1..25: note = Description of Artificial Sequence: Syntheticoligonucleotide
  misc_feature 1..25: note = Description of Combined DNA/RNA Molecule: Syntheticoligonucleotide
  source 1..25: mol_type = other DNA
  modified_base order(1,2,3,4,7,8,9,10,23): mod_base = OTHER; note = Uracil
ttttagttttgcaaagaaggggttt

SEQ ID NO: 1279 - RNA, 25 nt, synthetic construct
  misc_feature 1..25: note = Description of Artificial Sequence: Syntheticoligonucleotide
  source 1..25: mol_type = other RNA
ctataattgttttgctacgattcca

SEQ ID NO: 1280 - DNA, 25 bp, synthetic construct
  misc_feature 1..25: note = Description of Artificial Sequence: Syntheticoligonucleotide
  misc_feature 1..25: note = Description of Combined DNA/RNA Molecule: Syntheticoligonucleotide
  source 1..25: mol_type = other DNA
  modified_base order(2,3,4,6,8,12,16,17,20,21,23): mod_base = OTHER; note = Uracil
ctttatgtaaatcacttcattgttt

SEQ ID NO: 1281 - DNA, 25 bp, synthetic construct
  misc_feature 1..25: note = Description of Artificial Sequence: Syntheticoligonucleotide
  misc_feature 1..25: note = Description of Combined DNA/RNA Molecule: Syntheticoligonucleotide
  source 1..25: mol_type = other DNA
  modified_base order(1,2,3,5,7,11,15,16,19,20,22,23): mod_base = OTHER; note = Uracil
tttatgtaaatcacttcattgtttt

SEQ ID NO: 1282 - DNA, 25 bp, synthetic construct
  misc_feature 1..25: note = Description of Artificial Sequence: Syntheticoligonucleotide
  misc_feature 1..25: note = Description of Combined DNA/RNA Molecule: Syntheticoligonucleotide
  source 1..25: mol_type = other DNA
  modified_base order(1,2,4,6,10,14,15,18,19,21,22,23): mod_base = OTHER; note = Uracil
ttatgtaaatcacttcattgtttta

SEQ ID NO: 1283 - RNA, 25 nt, synthetic construct
  misc_feature 1..25: note = Description of Artificial Sequence: Syntheticoligonucleotide
  source 1..25: mol_type = other RNA
tatgtaaatcacttcattgttttaa

SEQ ID NO: 1284 - RNA, 25 nt, synthetic construct
  misc_feature 1..25: note = Description of Artificial Sequence: Syntheticoligonucleotide
  source 1..25: mol_type = other RNA
atgtaaatcacttcattgttttaaa

SEQ ID NO: 1285 - RNA, 25 nt, synthetic construct
  misc_feature 1..25: note = Description of Artificial Sequence: Syntheticoligonucleotide
  source 1..25: mol_type = other RNA
tgtaaatcacttcattgttttaaag

SEQ ID NO: 1286 - RNA, 25 nt, synthetic construct
  misc_feature 1..25: note = Description of Artificial Sequence: Syntheticoligonucleotide
  source 1..25: mol_type = other RNA
gtaaatcacttcattgttttaaagg

SEQ ID NO: 1287 - DNA, 25 bp, synthetic construct
  misc_feature 1..25: note = Description of Artificial Sequence: Syntheticoligonucleotide
  misc_feature 1..25: note = Description of Combined DNA/RNA Molecule: Syntheticoligonucleotide
  source 1..25: mol_type = other DNA
  modified_base order(1,3,4,5,6,14,19,20,23): mod_base = OTHER; note = Uracil
tgttttaaaggaataaacttgatta

SEQ ID NO: 1288 - DNA, 25 bp, synthetic construct
  misc_feature 1..25: note = Description of Artificial Sequence: Syntheticoligonucleotide
  misc_feature 1..25: note = Description of Combined DNA/RNA Molecule: Syntheticoligonucleotide
  source 1..25: mol_type = other DNA
  modified_base order(2,3,4,5,13,18,19,22,23): mod_base = OTHER; note = Uracil
gttttaaaggaataaacttgattat

SEQ ID NO: 1289 - DNA, 25 bp, synthetic construct
  misc_feature 1..25: note = Description of Artificial Sequence: Syntheticoligonucleotide
  misc_feature 1..25: note = Description of Combined DNA/RNA Molecule: Syntheticoligonucleotide
  source 1..25: mol_type = other DNA
  modified_base order(1,2,10,15,16,19,20,22): mod_base = OTHER; note = Uracil
ttaaaggaataaacttgattatatt

SEQ ID NO: 1290 - DNA, 25 bp, synthetic construct
  misc_feature 1..25: note = Description of Artificial Sequence: Syntheticoligonucleotide
  misc_feature 1..25: note = Description of Combined DNA/RNA Molecule: Syntheticoligonucleotide
  source 1..25: mol_type = other DNA
  modified_base order(1,9,14,15,18,19,21,23): mod_base = OTHER; note = Uracil
taaaggaataaacttgattatattg

SEQ ID NO: 1291 - DNA, 25 bp, synthetic construct
  misc_feature 1..25: note = Description of Artificial Sequence: Syntheticoligonucleotide
  misc_feature 1..25: note = Description of Combined DNA/RNA Molecule: Syntheticoligonucleotide
  source 1..25: mol_type = other DNA
  modified_base order(8,13,14,17,18,20,22,23): mod_base = OTHER; note = Uracil
aaaggaataaacttgattatattgt

SEQ ID NO: 1292 - DNA, 25 bp, synthetic construct
  misc_feature 1..25: note = Description of Artificial Sequence: Syntheticoligonucleotide
  misc_feature 1..25: note = Description of Combined DNA/RNA Molecule: Syntheticoligonucleotide
  source 1..25: mol_type = other DNA
  modified_base order(6,11,12,15,16,18,20,21,23): mod_base = OTHER; note = Uracil
aggaataaacttgattatattgttt

SEQ ID NO: 1293 - DNA, 25 bp, synthetic construct
  misc_feature 1..25: note = Description of Artificial Sequence: Syntheticoligonucleotide
  misc_feature 1..25: note = Description of Combined DNA/RNA Molecule: Syntheticoligonucleotide
  source 1..25: mol_type = other DNA
  modified_base order(5,10,11,14,15,17,19,20,22,23): mod_base = OTHER; note = Uracil
ggaataaacttgattatattgtttt

SEQ ID NO: 1294 - DNA, 25 bp, synthetic construct
  misc_feature 1..25: note = Description of Artificial Sequence: Syntheticoligonucleotide
  misc_feature 1..25: note = Description of Combined DNA/RNA Molecule: Syntheticoligonucleotide
  source 1..25: mol_type = other DNA
  modified_base order(4,9,10,13,14,16,18,19,21,22,23): mod_base = OTHER; note = Uracil
gaataaacttgattatattgttttt

SEQ ID NO: 1295 - DNA, 25 bp, synthetic construct
  misc_feature 1..25: note = Description of Artificial Sequence: Syntheticoligonucleotide
  misc_feature 1..25: note = Description of Combined DNA/RNA Molecule: Syntheticoligonucleotide
  source 1..25: mol_type = other DNA
  modified_base order(3,8,9,12,13,15,17,18,20,21,22,23): mod_base = OTHER; note = Uracil
aataaacttgattatattgtttttt

SEQ ID NO: 1296 - DNA, 25 bp, synthetic construct
  misc_feature 1..25: note = Description of Artificial Sequence: Syntheticoligonucleotide
  misc_feature 1..25: note = Description of Combined DNA/RNA Molecule: Syntheticoligonucleotide
  source 1..25: mol_type = other DNA
  modified_base order(2,7,8,11,12,14,16,17,19,20,21,22,23): mod_base = OTHER; note = Uracil
ataaacttgattatattgttttttt

SEQ ID NO: 1297 - DNA, 25 bp, synthetic construct
  misc_feature 1..25: note = Description of Artificial Sequence: Syntheticoligonucleotide
  misc_feature 1..25: note = Description of Combined DNA/RNA Molecule: Syntheticoligonucleotide
  source 1..25: mol_type = other DNA
  modified_base order(2,3,6,7,9,11,12,14,15,16,17,18,19,20,22,23): mod_base = OTHER; note = Uracil
cttgattatattgtttttttatttg

SEQ ID NO: 1298 - RNA, 25 nt, synthetic construct
  misc_feature 1..25: note = Description of Artificial Sequence: Syntheticoligonucleotide
  source 1..25: mol_type = other RNA
ttgattatattgtttttttatttgg

SEQ ID NO: 1299 - DNA, 25 bp, synthetic construct
  misc_feature 1..25: note = Description of Artificial Sequence: Syntheticoligonucleotide
  misc_feature 1..25: note = Description of Combined DNA/RNA Molecule: Syntheticoligonucleotide
  source 1..25: mol_type = other DNA
  modified_base order(2,3,5,7,8,10,11,12,13,14,15,16,18,19,20): mod_base = OTHER; note = Uracil
attatattgtttttttatttggcat

SEQ ID NO: 1300 - DNA, 25 bp, synthetic construct
  misc_feature 1..25: note = Description of Artificial Sequence: Syntheticoligonucleotide
  misc_feature 1..25: note = Description of Combined DNA/RNA Molecule: Syntheticoligonucleotide
  source 1..25: mol_type = other DNA
  modified_base order(2,3,5,6,7,8,9,10,11,13,14,15,20): mod_base = OTHER; note = Uracil
attgtttttttatttggcataactg

SEQ ID NO: 1301 - DNA, 25 bp, synthetic construct
  misc_feature 1..25: note = Description of Artificial Sequence: Syntheticoligonucleotide
  misc_feature 1..25: note = Description of Combined DNA/RNA Molecule: Syntheticoligonucleotide
  source 1..25: mol_type = other DNA
  modified_base order(1,2,4,5,6,7,8,9,10,12,13,14,19,23): mod_base = OTHER; note = Uracil
ttgtttttttatttggcataactgt

SEQ ID NO: 1302 - DNA, 25 bp, synthetic construct
  misc_feature 1..25: note = Description of Artificial Sequence: Syntheticoligonucleotide
  misc_feature 1..25: note = Description of Combined DNA/RNA Molecule: Syntheticoligonucleotide
  source 1..25: mol_type = other DNA
  modified_base order(1,2,3,4,5,6,8,9,10,15,19,21): mod_base = OTHER; note = Uracil
ttttttatttggcataactgtgatt

SEQ ID NO: 1303 - DNA, 25 bp, synthetic construct
  misc_feature 1..25: note = Description of Artificial Sequence: Syntheticoligonucleotide
  misc_feature 1..25: note = Description of Combined DNA/RNA Molecule: Syntheticoligonucleotide
  source 1..25: mol_type = other DNA
  modified_base order(1,2,3,4,5,7,8,9,14,18,20,23): mod_base = OTHER; note = Uracil
tttttatttggcataactgtgattc

SEQ ID NO: 1304 - DNA, 25 bp, synthetic construct
  misc_feature 1..25: note = Description of Artificial Sequence: Syntheticoligonucleotide
  misc_feature 1..25: note = Description of Combined DNA/RNA Molecule: Syntheticoligonucleotide
  source 1..25: mol_type = other DNA
  modified_base order(2,6,8,11,12,14,15,16,17): mod_base = OTHER; note = Uracil
ataactgtgattcttttaggacaat

SEQ ID NO: 1305 - DNA, 25 bp, synthetic construct
  misc_feature 1..25: note = Description of Artificial Sequence: Syntheticoligonucleotide
  misc_feature 1..25: note = Description of Combined DNA/RNA Molecule: Syntheticoligonucleotide
  source 1..25: mol_type = other DNA
  modified_base order(1,3,6,7,9,10,11,12,20,21): mod_base = OTHER; note = Uracil
tgtgattcttttaggacaattactg

SEQ ID NO: 1306 - DNA, 25 bp, synthetic construct
  misc_feature 1..25: note = Description of Artificial Sequence: Syntheticoligonucleotide
  misc_feature 1..25: note = Description of Combined DNA/RNA Molecule: Syntheticoligonucleotide
  source 1..25: mol_type = other DNA
  modified_base order(2,5,6,8,9,10,11,19,20,23): mod_base = OTHER; note = Uracil
gtgattcttttaggacaattactgt

SEQ ID NO: 1307 - RNA, 25 nt, synthetic construct
  misc_feature 1..25: note = Description of Artificial Sequence: Syntheticoligonucleotide
  source 1..25: mol_type = other RNA
tgtatgtcagatattcatattgacc

SEQ ID NO: 1308 - RNA, 25 nt, synthetic construct
  misc_feature 1..25: note = Description of Artificial Sequence: Syntheticoligonucleotide
  source 1..25: mol_type = other RNA
gtatgtcagatattcatattgaccc

SEQ ID NO: 1309 - DNA, 25 bp, synthetic construct
  misc_feature 1..25: note = Description of Artificial Sequence: Syntheticoligonucleotide
  misc_feature 1..25: note = Description of Combined DNA/RNA Molecule: Syntheticoligonucleotide
  source 1..25: mol_type = other DNA
  modified_base order(3,5,7,10,12,13,18,19,20,21,23): mod_base = OTHER; note = Uracil
aatgtgtaatattccagttttctct

SEQ ID NO: 1310 - RNA, 25 nt, synthetic construct
  misc_feature 1..25: note = Description of Artificial Sequence: Syntheticoligonucleotide
  source 1..25: mol_type = other RNA
taagtaattaaaatatacttaaaaa

SEQ ID NO: 1311 - DNA, 25 bp, synthetic construct
  misc_feature 1..25: note = Description of Artificial Sequence: Syntheticoligonucleotide
  misc_feature 1..25: note = Description of Combined DNA/RNA Molecule: Syntheticoligonucleotide
  source 1..25: mol_type = other DNA
  modified_base order(4,7,8,13,15,18,19): mod_base = OTHER; note = Uracil
aagtaattaaaatatacttaaaaat

SEQ ID NO: 1312 - DNA, 25 bp, synthetic construct
  misc_feature 1..25: note = Description of Artificial Sequence: Syntheticoligonucleotide
  misc_feature 1..25: note = Description of Combined DNA/RNA Molecule: Syntheticoligonucleotide
  source 1..25: mol_type = other DNA
  modified_base order(3,6,7,12,14,17,18): mod_base = OTHER; note = Uracil
agtaattaaaatatacttaaaaatt

SEQ ID NO: 1313 - DNA, 25 bp, synthetic construct
  misc_feature 1..25: note = Description of Artificial Sequence: Syntheticoligonucleotide
  misc_feature 1..25: note = Description of Combined DNA/RNA Molecule: Syntheticoligonucleotide
  source 1..25: mol_type = other DNA
  modified_base order(2,5,6,11,13,16,17,23): mod_base = OTHER; note = Uracil
gtaattaaaatatacttaaaaatta

SEQ ID NO: 1314 - RNA, 25 nt, synthetic construct
  misc_feature 1..25: note = Description of Artificial Sequence: Syntheticoligonucleotide
  source 1..25: mol_type = other RNA
taattaaaatatacttaaaaattaa

SEQ ID NO: 1315 - DNA, 25 bp, synthetic construct
  misc_feature 1..25: note = Description of Artificial Sequence: Syntheticoligonucleotide
  misc_feature 1..25: note = Description of Combined DNA/RNA Molecule: Syntheticoligonucleotide
  source 1..25: mol_type = other DNA
  modified_base order(3,4,9,11,14,15,21,22): mod_base = OTHER; note = Uracil
aattaaaatatacttaaaaattaat

SEQ ID NO: 1316 - DNA, 25 bp, synthetic construct
  misc_feature 1..25: note = Description of Artificial Sequence: Syntheticoligonucleotide
  misc_feature 1..25: note = Description of Combined DNA/RNA Molecule: Syntheticoligonucleotide
  source 1..25: mol_type = other DNA
  modified_base order(2,3,8,10,13,14,20,21): mod_base = OTHER; note = Uracil
attaaaatatacttaaaaattaata

SEQ ID NO: 1317 - RNA, 25 nt, synthetic construct
  misc_feature 1..25: note = Description of Artificial Sequence: Syntheticoligonucleotide
  source 1..25: mol_type = other RNA
ttaaaatatacttaaaaattaatag

SEQ ID NO: 1318 - DNA, 25 bp, synthetic construct
  misc_feature 1..25: note = Description of Artificial Sequence: Syntheticoligonucleotide
  misc_feature 1..25: note = Description of Combined DNA/RNA Molecule: Syntheticoligonucleotide
  source 1..25: mol_type = other DNA
  modified_base order(1,6,8,11,12,18,19,22): mod_base = OTHER; note = Uracil
taaaatatacttaaaaattaatagt

SEQ ID NO: 1319 - DNA, 25 bp, synthetic construct
  misc_feature 1..25: note = Description of Artificial Sequence: Syntheticoligonucleotide
  misc_feature 1..25: note = Description of Combined DNA/RNA Molecule: Syntheticoligonucleotide
  source 1..25: mol_type = other DNA
  modified_base order(4,6,9,10,16,17,20,23): mod_base = OTHER; note = Uracil
aaatatacttaaaaattaatagttt

SEQ ID NO: 1320 - DNA, 25 bp, synthetic construct
  misc_feature 1..25: note = Description of Artificial Sequence: Syntheticoligonucleotide
  misc_feature 1..25: note = Description of Combined DNA/RNA Molecule: Syntheticoligonucleotide
  source 1..25: mol_type = other DNA
  modified_base order(3,5,8,9,15,16,19,22,23): mod_base = OTHER; note = Uracil
aatatacttaaaaattaatagtttt

SEQ ID NO: 1321 - DNA, 25 bp, synthetic construct
  misc_feature 1..25: note = Description of Artificial Sequence: Syntheticoligonucleotide
  misc_feature 1..25: note = Description of Combined DNA/RNA Molecule: Syntheticoligonucleotide
  source 1..25: mol_type = other DNA
  modified_base order(2,4,7,8,14,15,18,21,22,23): mod_base = OTHER; note = Uracil
atatacttaaaaattaatagtttta

SEQ ID NO: 1322 - DNA, 25 bp, synthetic construct
  misc_feature 1..25: note = Description of Artificial Sequence: Syntheticoligonucleotide
  misc_feature 1..25: note = Description of Combined DNA/RNA Molecule: Syntheticoligonucleotide
  source 1..25: mol_type = other DNA
  modified_base order(1,3,6,7,13,14,17,20,21,22,23): mod_base = OTHER; note = Uracil
tatacttaaaaattaatagttttat

SEQ ID NO: 1323 - RNA, 25 nt, synthetic construct
  misc_feature 1..25: note = Description of Artificial Sequence: Syntheticoligonucleotide
  source 1..25: mol_type = other RNA
cttaaaaattaatagttttatctgg

SEQ ID NO: 1324 - RNA, 25 nt, synthetic construct
  misc_feature 1..25: note = Description of Artificial Sequence: Syntheticoligonucleotide
  source 1..25: mol_type = other RNA
aaaattaatagttttatctgggtac

SEQ ID NO: 1325 - RNA, 25 nt, synthetic construct
  misc_feature 1..25: note = Description of Artificial Sequence: Syntheticoligonucleotide
  source 1..25: mol_type = other RNA
aaattaatagttttatctgggtaca

SEQ ID NO: 1326 - RNA, 25 nt, synthetic construct
  misc_feature 1..25: note = Description of Artificial Sequence: Syntheticoligonucleotide
  source 1..25: mol_type = other RNA
aattaatagttttatctgggtacaa

SEQ ID NO: 1327 - DNA, 25 bp, synthetic construct
  misc_feature 1..25: note = Description of Artificial Sequence: Syntheticoligonucleotide
  misc_feature 1..25: note = Description of Combined DNA/RNA Molecule: Syntheticoligonucleotide
  source 1..25: mol_type = other DNA
  modified_base order(2,6,12,20): mod_base = OTHER; note = Uracil
ctgggtacaaataaacaggtgcctg

SEQ ID NO: 1328 - RNA, 25 nt, synthetic construct
  misc_feature 1..25: note = Description of Artificial Sequence: Syntheticoligonucleotide
  source 1..25: mol_type = other RNA
caaggaaacttctatgtaaaaatca

SEQ ID NO: 1329 - RNA, 25 nt, synthetic construct
  misc_feature 1..25: note = Description of Artificial Sequence: Syntheticoligonucleotide
  source 1..25: mol_type = other RNA
aaggaaacttctatgtaaaaatcac

SEQ ID NO: 1330 - DNA, 25 bp, synthetic construct
  misc_feature 1..25: note = Description of Artificial Sequence: Syntheticoligonucleotide
  misc_feature 1..25: note = Description of Combined DNA/RNA Molecule: Syntheticoligonucleotide
  source 1..25: mol_type = other DNA
  modified_base order(8,9,11,13,15,21): mod_base = OTHER; note = Uracil
aggaaacttctatgtaaaaatcact

SEQ ID NO: 1331 - DNA, 25 bp, synthetic construct
  misc_feature 1..25: note = Description of Artificial Sequence: Syntheticoligonucleotide
  misc_feature 1..25: note = Description of Combined DNA/RNA Molecule: Syntheticoligonucleotide
  source 1..25: mol_type = other DNA
  modified_base order(2,4,6,12,16,18,21,22,23): mod_base = OTHER; note = Uracil
ctatgtaaaaatcactatgatttct

SEQ ID NO: 1332 - DNA, 25 bp, synthetic construct
  misc_feature 1..25: note = Description of Artificial Sequence: Syntheticoligonucleotide
  misc_feature 1..25: note = Description of Combined DNA/RNA Molecule: Syntheticoligonucleotide
  source 1..25: mol_type = other DNA
  modified_base order(1,3,5,11,15,17,20,21,22): mod_base = OTHER; note = Uracil
tatgtaaaaatcactatgatttctg

SEQ ID NO: 1333 - RNA, 25 nt, synthetic construct
  misc_feature 1..25: note = Description of Artificial Sequence: Syntheticoligonucleotide
  source 1..25: mol_type = other RNA
atgtaaaaatcactatgatttctga

SEQ ID NO: 1334 - DNA, 25 bp, synthetic construct
  misc_feature 1..25: note = Description of Artificial Sequence: Syntheticoligonucleotide
  misc_feature 1..25: note = Description of Combined DNA/RNA Molecule: Syntheticoligonucleotide
  source 1..25: mol_type = other DNA
  modified_base order(6,10,12,15,16,17,19,23): mod_base = OTHER; note = Uracil
aaaaatcactatgatttctgaattg

SEQ ID NO: 1335 - RNA, 25 nt, synthetic construct
  misc_feature 1..25: note = Description of Artificial Sequence: Syntheticoligonucleotide
  source 1..25: mol_type = other RNA
aaaatcactatgatttctgaattgc

SEQ ID NO: 1336 - RNA, 25 nt, synthetic construct
  misc_feature 1..25: note = Description of Artificial Sequence: Syntheticoligonucleotide
  source 1..25: mol_type = other RNA
atgatttctgaattgctatgtgaaa

SEQ ID NO: 1337 - RNA, 25 nt, synthetic construct
  misc_feature 1..25: note = Description of Artificial Sequence: Syntheticoligonucleotide
  source 1..25: mol_type = other RNA
tgatttctgaattgctatgtgaaac

SEQ ID NO: 1338 - RNA, 25 nt, synthetic construct
  misc_feature 1..25: note = Description of Artificial Sequence: Syntheticoligonucleotide
  source 1..25: mol_type = other RNA
tgtgaaactacagatctttggaaca

SEQ ID NO: 1339 - RNA, 25 nt, synthetic construct
  misc_feature 1..25: note = Description of Artificial Sequence: Syntheticoligonucleotide
  source 1..25: mol_type = other RNA
gtgaaactacagatctttggaacac

SEQ ID NO: 1340 - DNA, 25 bp, synthetic construct
  misc_feature 1..25: note = Description of Artificial Sequence: Syntheticoligonucleotide
  misc_feature 1..25: note = Description of Combined DNA/RNA Molecule: Syntheticoligonucleotide
  source 1..25: mol_type = other DNA
  modified_base order(3,5,6,12,13,20): mod_base = OTHER; note = Uracil
ggtgttaagacttacacagtacctc

SEQ ID NO: 1341 - RNA, 25 nt, synthetic construct
  misc_feature 1..25: note = Description of Artificial Sequence: Syntheticoligonucleotide
  source 1..25: mol_type = other RNA
taggcctcttgaatttttgatgtag

SEQ ID NO: 1342 - DNA, 25 bp, synthetic construct
  misc_feature 1..25: note = Description of Artificial Sequence: Syntheticoligonucleotide
  misc_feature 1..25: note = Description of Combined DNA/RNA Molecule: Syntheticoligonucleotide
  source 1..25: mol_type = other DNA
  modified_base order(1,2,6,7,8,9,10,13,15,19): mod_base = OTHER; note = Uracil
ttgaatttttgatgtagatgggcat

SEQ ID NO: 1343 - DNA, 25 bp, synthetic construct
  misc_feature 1..25: note = Description of Artificial Sequence: Syntheticoligonucleotide
  misc_feature 1..25: note = Description of Combined DNA/RNA Molecule: Syntheticoligonucleotide
  source 1..25: mol_type = other DNA
  modified_base order(1,5,6,7,8,9,12,14,18): mod_base = OTHER; note = Uracil
tgaatttttgatgtagatgggcatt

SEQ ID NO: 1344 - RNA, 25 nt, synthetic construct
  misc_feature 1..25: note = Description of Artificial Sequence: Syntheticoligonucleotide
  source 1..25: mol_type = other RNA
gatgggcatttttttaaggtagtgg

SEQ ID NO: 1345 - DNA, 25 bp, synthetic construct
  misc_feature 1..25: note = Description of Artificial Sequence: Syntheticoligonucleotide
  misc_feature 1..25: note = Description of Combined DNA/RNA Molecule: Syntheticoligonucleotide
  source 1..25: mol_type = other DNA
  modified_base order(3,4,5,6,7,8,9,14,17,20,21): mod_base = OTHER; note = Uracil
catttttttaaggtagtggttaatt

SEQ ID NO: 1346 - RNA, 25 nt, synthetic construct
  misc_feature 1..25: note = Description of Artificial Sequence: Syntheticoligonucleotide
  source 1..25: mol_type = other RNA
gtagtggttaattacctttatgtga

SEQ ID NO: 1347 - RNA, 25 nt, synthetic construct
  misc_feature 1..25: note = Description of Artificial Sequence: Syntheticoligonucleotide
  source 1..25: mol_type = other RNA
agtggttaattacctttatgtgaac

SEQ ID NO: 1348 - DNA, 25 bp, synthetic construct
  misc_feature 1..25: note = Description of Artificial Sequence: Syntheticoligonucleotide
  misc_feature 1..25: note = Description of Combined DNA/RNA Molecule: Syntheticoligonucleotide
  source 1..25: mol_type = other DNA
  modified_base order(2,5,6,9,10,14,15,16,18,20): mod_base = OTHER; note = Uracil
gtggttaattacctttatgtgaact

SEQ ID NO: 1349 - DNA, 25 bp, synthetic construct
  misc_feature 1..25: note = Description of Artificial Sequence: Syntheticoligonucleotide
  misc_feature 1..25: note = Description of Combined DNA/RNA Molecule: Syntheticoligonucleotide
  source 1..25: mol_type = other DNA
  modified_base order(1,4,5,8,9,13,14,15,17,19): mod_base = OTHER; note = Uracil
tggttaattacctttatgtgaactt

SEQ ID NO: 1350 - DNA, 25 bp, synthetic construct
  misc_feature 1..25: note = Description of Artificial Sequence: Syntheticoligonucleotide
  misc_feature 1..25: note = Description of Combined DNA/RNA Molecule: Syntheticoligonucleotide
  source 1..25: mol_type = other DNA
  modified_base order(3,4,7,8,12,13,14,16,18,23): mod_base = OTHER; note = Uracil
ggttaattacctttatgtgaacttt

SEQ ID NO: 1351 - DNA, 25 bp, synthetic construct
  misc_feature 1..25: note = Description of Artificial Sequence: Syntheticoligonucleotide
  misc_feature 1..25: note = Description of Combined DNA/RNA Molecule: Syntheticoligonucleotide
  source 1..25: mol_type = other DNA
  modified_base order(2,3,4,6,8,13,14,15,19,22,23): mod_base = OTHER; note = Uracil
ctttatgtgaactttgaatggttta

SEQ ID NO: 1352 - RNA, 25 nt, synthetic construct
  misc_feature 1..25: note = Description of Artificial Sequence: Syntheticoligonucleotide
  source 1..25: mol_type = other RNA
tgtgaactttgaatggtttaacaaa

SEQ ID NO: 1353 - DNA, 25 bp, synthetic construct
  misc_feature 1..25: note = Description of Artificial Sequence: Syntheticoligonucleotide
  misc_feature 1..25: note = Description of Combined DNA/RNA Molecule: Syntheticoligonucleotide
  source 1..25: mol_type = other DNA
  modified_base order(2,3,4,8,11,12,13,23): mod_base = OTHER; note = Uracil
ctttgaatggtttaacaaaagattt

SEQ ID NO: 1354 - DNA, 25 bp, synthetic construct
  misc_feature 1..25: note = Description of Artificial Sequence: Syntheticoligonucleotide
  misc_feature 1..25: note = Description of Combined DNA/RNA Molecule: Syntheticoligonucleotide
  source 1..25: mol_type = other DNA
  modified_base order(4,7,8,9,19,20,21,23): mod_base = OTHER; note = Uracil
gaatggtttaacaaaagatttgttt

SEQ ID NO: 1355 - DNA, 25 bp, synthetic construct
  misc_feature 1..25: note = Description of Artificial Sequence: Syntheticoligonucleotide
  misc_feature 1..25: note = Description of Combined DNA/RNA Molecule: Syntheticoligonucleotide
  source 1..25: mol_type = other DNA
  modified_base order(3,6,7,8,18,19,20,22,23): mod_base = OTHER; note = Uracil
aatggtttaacaaaagatttgtttt

SEQ ID NO: 1356 - DNA, 25 bp, synthetic construct
  misc_feature 1..25: note = Description of Artificial Sequence: Syntheticoligonucleotide
  misc_feature 1..25: note = Description of Combined DNA/RNA Molecule: Syntheticoligonucleotide
  source 1..25: mol_type = other DNA
  modified_base order(2,5,6,7,17,18,19,21,22,23): mod_base = OTHER; note = Uracil
atggtttaacaaaagatttgttttt

SEQ ID NO: 1357 - DNA, 25 bp, synthetic construct
  misc_feature 1..25: note = Description of Artificial Sequence: Syntheticoligonucleotide
  misc_feature 1..25: note = Description of Combined DNA/RNA Molecule: Syntheticoligonucleotide
  source 1..25: mol_type = other DNA
  modified_base order(1,4,5,6,16,17,18,20,21,22,23): mod_base = OTHER; note = Uracil
tggtttaacaaaagatttgtttttg

SEQ ID NO: 1358 - DNA, 25 bp, synthetic construct
  misc_feature 1..25: note = Description of Artificial Sequence: Syntheticoligonucleotide
  misc_feature 1..25: note = Description of Combined DNA/RNA Molecule: Syntheticoligonucleotide
  source 1..25: mol_type = other DNA
  modified_base order(3,4,5,15,16,17,19,20,21,22,23): mod_base = OTHER; note = Uracil
ggtttaacaaaagatttgtttttgt

SEQ ID NO: 1359 - RNA, 25 nt, synthetic construct
  misc_feature 1..25: note = Description of Artificial Sequence: Syntheticoligonucleotide
  source 1..25: mol_type = other RNA
tttaacaaaagatttgtttttgtag

SEQ ID NO: 1360 - RNA, 25 nt, synthetic construct
  misc_feature 1..25: note = Description of Artificial Sequence: Syntheticoligonucleotide
  source 1..25: mol_type = other RNA
ttaacaaaagatttgtttttgtaga

SEQ ID NO: 1361 - DNA, 25 bp, synthetic construct
  misc_feature 1..25: note = Description of Artificial Sequence: Syntheticoligonucleotide
  misc_feature 1..25: note = Description of Combined DNA/RNA Molecule: Syntheticoligonucleotide
  source 1..25: mol_type = other DNA
  modified_base order(8,9,10,12,13,14,15,16,18): mod_base = OTHER; note = Uracil
caaaagatttgtttttgtagagatt

SEQ ID NO: 1362 - DNA, 25 bp, synthetic construct
  misc_feature 1..25: note = Description of Artificial Sequence: Syntheticoligonucleotide
  misc_feature 1..25: note = Description of Combined DNA/RNA Molecule: Syntheticoligonucleotide
  source 1..25: mol_type = other DNA
  modified_base order(7,8,9,11,12,13,14,15,17,23): mod_base = OTHER; note = Uracil
aaaagatttgtttttgtagagattt

SEQ ID NO: 1363 - DNA, 25 bp, synthetic construct
  misc_feature 1..25: note = Description of Artificial Sequence: Syntheticoligonucleotide
  misc_feature 1..25: note = Description of Combined DNA/RNA Molecule: Syntheticoligonucleotide
  source 1..25: mol_type = other DNA
  modified_base order(6,7,8,10,11,12,13,14,16,22,23): mod_base = OTHER; note = Uracil
aaagatttgtttttgtagagatttt

SEQ ID NO: 1364 - RNA, 25 nt, synthetic construct
  misc_feature 1..25: note = Description of Artificial Sequence: Syntheticoligonucleotide
  source 1..25: mol_type = other RNA
agatttgtttttgtagagattttaa

SEQ ID NO: 1365 - RNA, 25 nt, synthetic construct
  misc_feature 1..25: note = Description of Artificial Sequence: Syntheticoligonucleotide
  source 1..25: mol_type = other RNA
gatttgtttttgtagagattttaaa

SEQ ID NO: 1366 - RNA, 25 nt, synthetic construct
  misc_feature 1..25: note = Description of Artificial Sequence: Syntheticoligonucleotide
  source 1..25: mol_type = other RNA
atttgtttttgtagagattttaaag

SEQ ID NO: 1367 - RNA, 25 nt, synthetic construct
  misc_feature 1..25: note = Description of Artificial Sequence: Syntheticoligonucleotide
  source 1..25: mol_type = other RNA
tttgtttttgtagagattttaaagg

SEQ ID NO: 1368 - RNA, 25 nt, synthetic construct
  misc_feature 1..25: note = Description of Artificial Sequence: Syntheticoligonucleotide
  source 1..25: mol_type = other RNA
tttgtagagattttaaagggggaga

SEQ ID NO: 1369 - DNA, 25 bp, synthetic construct
  misc_feature 1..25: note = Description of Artificial Sequence: Syntheticoligonucleotide
  misc_feature 1..25: note = Description of Combined DNA/RNA Molecule: Syntheticoligonucleotide
  source 1..25: mol_type = other DNA
  modified_base order(10,11,13,19,23): mod_base = OTHER; note = Uracil
gggggagaattctagaaataaatgt

SEQ ID NO: 1370 - DNA, 25 bp, synthetic construct
  misc_feature 1..25: note = Description of Artificial Sequence: Syntheticoligonucleotide
  misc_feature 1..25: note = Description of Combined DNA/RNA Molecule: Syntheticoligonucleotide
  source 1..25: mol_type = other DNA
  modified_base order(8,9,11,17,21,23): mod_base = OTHER; note = Uracil
gggagaattctagaaataaatgtta

SEQ ID NO: 1371 - RNA, 25 nt, synthetic construct
  misc_feature 1..25: note = Description of Artificial Sequence: Syntheticoligonucleotide
  source 1..25: mol_type = other RNA
ggagaattctagaaataaatgttac

SEQ ID NO: 1372 - RNA, 25 nt, synthetic construct
  misc_feature 1..25: note = Description of Artificial Sequence: Syntheticoligonucleotide
  source 1..25: mol_type = other RNA
gagaattctagaaataaatgttacc

SEQ ID NO: 1373 - DNA, 25 bp, synthetic construct
  misc_feature 1..25: note = Description of Artificial Sequence: Syntheticoligonucleotide
  misc_feature 1..25: note = Description of Combined DNA/RNA Molecule: Syntheticoligonucleotide
  source 1..25: mol_type = other DNA
  modified_base order(5,6,8,14,18,20,21): mod_base = OTHER; note = Uracil
agaattctagaaataaatgttacct

SEQ ID NO: 1374 - DNA, 25 bp, synthetic construct
  misc_feature 1..25: note = Description of Artificial Sequence: Syntheticoligonucleotide
  misc_feature 1..25: note = Description of Artificial Sequence: Syntheticoligonucleotide
  source 1..25: mol_type = other DNA
  modified_base order(4,5,7,13,17,19,20): mod_base = OTHER; note = Uracil
gaattctagaaataaatgttaccta

SEQ ID NO: 1375 - DNA, 25 bp, synthetic construct
  misc_feature 1..25: note = Description of Artificial Sequence: Syntheticoligonucleotide
  misc_feature 1..25: note = Description of Combined DNA/RNA Molecule: Syntheticoligonucleotide
  source 1..25: mol_type = other DNA
  modified_base order(2,8,12,14,15,19,22,23): mod_base = OTHER; note = Uracil
ctagaaataaatgttacctaattat

SEQ ID NO: 1376 - DNA, 25 bp, synthetic construct
  misc_feature 1..25: note = Description of Artificial Sequence: Syntheticoligonucleotide
  misc_feature 1..25: note = Description of Combined DNA/RNA Molecule: Syntheticoligonucleotide
  source 1..25: mol_type = other DNA
  modified_base order(1,7,11,13,14,18,21,22): mod_base = OTHER; note = Uracil
tagaaataaatgttacctaattatt

SEQ ID NO: 1377 - DNA, 25 bp, synthetic construct
  misc_feature 1..25: note = Description of Artificial Sequence: Syntheticoligonucleotide
  misc_feature 1..25: note = Description of Combined DNA/RNA Molecule: Syntheticoligonucleotide
  source 1..25: mol_type = other DNA
  modified_base order(6,10,12,13,17,20,21,23): mod_base = OTHER; note = Uracil
agaaataaatgttacctaattatta

SEQ ID NO: 1378 - RNA, 25 nt, synthetic construct
  misc_feature 1..25: note = Description of Artificial Sequence: Syntheticoligonucleotide
  source 1..25: mol_type = other RNA
gaaataaatgttacctaattattac

SEQ ID NO: 1379 - RNA, 25 nt, synthetic construct
  misc_feature 1..25: note = Description of Artificial Sequence: Syntheticoligonucleotide
  source 1..25: mol_type = other RNA
aaataaatgttacctaattattaca

SEQ ID NO: 1380 - RNA, 25 nt, synthetic construct
  misc_feature 1..25: note = Description of Artificial Sequence: Syntheticoligonucleotide
  source 1..25: mol_type = other RNA
ataaatgttacctaattattacagc

SEQ ID NO: 1381 - RNA, 25 nt, synthetic construct
  misc_feature 1..25: note = Description of Artificial Sequence: Syntheticoligonucleotide
  source 1..25: mol_type = other RNA
ctaattattacagccttaaagacaa

SEQ ID NO: 1382 - RNA, 25 nt, synthetic construct
  misc_feature 1..25: note = Description of Artificial Sequence: Syntheticoligonucleotide
  source 1..25: mol_type = other RNA
taattattacagccttaaagacaaa

SEQ ID NO: 1383 - RNA, 25 nt, synthetic construct
  misc_feature 1..25: note = Description of Artificial Sequence: Syntheticoligonucleotide
  source 1..25: mol_type = other RNA
ttaaagacaaaaatccttgttgaag

SEQ ID NO: 1384 - DNA, 25 bp, synthetic construct
  misc_feature 1..25: note = Description of Artificial Sequence: Syntheticoligonucleotide
  misc_feature 1..25: note = Description of Combined DNA/RNA Molecule: Syntheticoligonucleotide
  source 1..25: mol_type = other DNA
  modified_base order(11,14,15,17,18,23): mod_base = OTHER; note = Uracil
aagacaaaaatccttgttgaagttt

SEQ ID NO: 1385 - RNA, 25 nt, synthetic construct
  misc_feature 1..25: note = Description of Artificial Sequence: Syntheticoligonucleotide
  source 1..25: mol_type = other RNA
cttgttgaagtttttttaaaaaaag

SEQ ID NO: 1386 - RNA, 25 nt, synthetic construct
  misc_feature 1..25: note = Description of Artificial Sequence: Syntheticoligonucleotide
  source 1..25: mol_type = other RNA
ttgttgaagtttttttaaaaaaagc

SEQ ID NO: 1387 - DNA, 25 bp, synthetic construct
  misc_feature 1..25: note = Description of Artificial Sequence: Syntheticoligonucleotide
  misc_feature 1..25: note = Description of Combined DNA/RNA Molecule: Syntheticoligonucleotide
  source 1..25: mol_type = other DNA
  modified_base order(2,3,8,9,10,11,12,13,14): mod_base = OTHER; note = Uracil
gttgaagtttttttaaaaaaagcta

SEQ ID NO: 1388 - RNA, 25 nt, synthetic construct
  misc_feature 1..25: note = Description of Artificial Sequence: Syntheticoligonucleotide
  source 1..25: mol_type = other RNA
ttgaagtttttttaaaaaaagctaa

SEQ ID NO: 1389 - DNA, 25 bp, synthetic construct
  misc_feature 1..25: note = Description of Artificial Sequence: Syntheticoligonucleotide
  misc_feature 1..25: note = Description of Combined DNA/RNA Molecule: Syntheticoligonucleotide
  source 1..25: mol_type = other DNA
  modified_base order(3,4,5,6,7,8,9,19,23): mod_base = OTHER; note = Uracil
agtttttttaaaaaaagctaaatta

SEQ ID NO: 1390 - RNA, 25 nt, synthetic construct
  misc_feature 1..25: note = Description of Artificial Sequence: Syntheticoligonucleotide
  source 1..25: mol_type = other RNA
gtttttttaaaaaaagctaaattac

SEQ ID NO: 1391 - RNA, 25 nt, synthetic construct
  misc_feature 1..25: note = Description of Artificial Sequence: Syntheticoligonucleotide
  source 1..25: mol_type = other RNA
tttttttaaaaaaagctaaattaca

SEQ ID NO: 1392 - DNA, 25 bp, synthetic construct
  misc_feature 1..25: note = Description of Artificial Sequence: Syntheticoligonucleotide
  misc_feature 1..25: note = Description of Combined DNA/RNA Molecule: Syntheticoligonucleotide
  source 1..25: mol_type = other DNA
  modified_base order(1,2,3,4,5,6,16,20,21): mod_base = OTHER; note = Uracil
ttttttaaaaaaagctaaattacat

SEQ ID NO: 1393 - DNA, 25 bp, synthetic construct
  misc_feature 1..25: note = Description of Artificial Sequence: Syntheticoligonucleotide
  misc_feature 1..25: note = Description of Combined DNA/RNA Molecule: Syntheticoligonucleotide
  source 1..25: mol_type = other DNA
  modified_base order(1,2,3,4,5,15,19,20): mod_base = OTHER; note = Uracil
tttttaaaaaaagctaaattacata

SEQ ID NO: 1394 - DNA, 25 bp, synthetic construct
  misc_feature 1..25: note = Description of Artificial Sequence: Syntheticoligonucleotide
  misc_feature 1..25: note = Description of Combined DNA/RNA Molecule: Syntheticoligonucleotide
  source 1..25: mol_type = other DNA
  modified_base order(1,11,15,16,20): mod_base = OTHER; note = Uracil
taaaaaaagctaaattacatagact

SEQ ID NO: 1395 - DNA, 25 bp, synthetic construct
  misc_feature 1..25: note = Description of Artificial Sequence: Syntheticoligonucleotide
  misc_feature 1..25: note = Description of Combined DNA/RNA Molecule: Syntheticoligonucleotide
  source 1..25: mol_type = other DNA
  modified_base order(9,13,14,18,23): mod_base = OTHER; note = Uracil
aaaaaagctaaattacatagactta

SEQ ID NO: 1396 - RNA, 25 nt, synthetic construct
  misc_feature 1..25: note = Description of Artificial Sequence: Syntheticoligonucleotide
  source 1..25: mol_type = other RNA
ttaggcattaacatgtttgtggaag

SEQ ID NO: 1397 - RNA, 25 nt, synthetic construct
  misc_feature 1..25: note = Description of Artificial Sequence: Syntheticoligonucleotide
  source 1..25: mol_type = other RNA
taggcattaacatgtttgtggaaga

SEQ ID NO: 1398 - DNA, 25 bp, synthetic construct
  misc_feature 1..25: note = Description of Artificial Sequence: Syntheticoligonucleotide
  misc_feature 1..25: note = Description of Combined DNA/RNA Molecule: Syntheticoligonucleotide
  source 1..25: mol_type = other DNA
  modified_base order(7,9,11,12,14,16,19,20,21): mod_base = OTHER; note = Uracil
cagacgtatattgtatcatttgagt

SEQ ID NO: 1399 - DNA, 25 bp, synthetic construct
  misc_feature 1..25: note = Description of Artificial Sequence: Syntheticoligonucleotide
  misc_feature 1..25: note = Description of Combined DNA/RNA Molecule: Syntheticoligonucleotide
  source 1..25: mol_type = other DNA
  modified_base order(3,5,7,8,10,12,15,16,17,21): mod_base = OTHER; note = order(3,5,7,8,10,12,15,16,17,21)
cgtatattgtatcatttgagtgaat

SEQ ID NO: 1400 - DNA, 25 bp, synthetic construct
  misc_feature 1..25: note = Description of Artificial Sequence: Syntheticoligonucleotide
  misc_feature 1..25: note = Description of Combined DNA/RNA Molecule: Syntheticoligonucleotide
  source 1..25: mol_type = other DNA
  modified_base order(1,3,5,6,8,10,13,14,15,19,23): mod_base = OTHER; note = Uracil
tatattgtatcatttgagtgaatgt

SEQ ID NO: 1401 - RNA, 25 nt, synthetic construct
  misc_feature 1..25: note = Description of Artificial Sequence: Syntheticoligonucleotide
  source 1..25: mol_type = other RNA
attgtatcatttgagtgaatgttcc

SEQ ID NO: 1402 - RNA, 25 nt, synthetic construct
  misc_feature 1..25: note = Description of Artificial Sequence: Syntheticoligonucleotide
  source 1..25: mol_type = other RNA
ttgtatcatttgagtgaatgttccc

SEQ ID NO: 1403 - RNA, 25 nt, synthetic construct
  misc_feature 1..25: note = Description of Artificial Sequence: Syntheticoligonucleotide
  source 1..25: mol_type = other RNA
tgtatcatttgagtgaatgttccca

SEQ ID NO: 1404 - DNA, 25 bp, synthetic construct
  misc_feature 1..25: note = Description of Artificial Sequence: Syntheticoligonucleotide
  misc_feature 1..25: note = Description of Combined DNA/RNA Molecule: Syntheticoligonucleotide
  source 1..25: mol_type = other DNA
  modified_base order(6,7,8,15,19,20,21,22): mod_base = OTHER; note = Uracil
aggaatttagaacctaacttttata

SEQ ID NO: 1405 - RNA, 25 nt, synthetic construct
  misc_feature 1..25: note = Description of Artificial Sequence: Syntheticoligonucleotide
  source 1..25: mol_type = other RNA
ggaatttagaacctaacttttatag

SEQ ID NO: 1406 - DNA, 25 bp, synthetic construct
  misc_feature 1..25: note = Description of Artificial Sequence: Syntheticoligonucleotide
  misc_feature 1..25: note = Description of Combined DNA/RNA Molecule: Syntheticoligonucleotide
  source 1..25: mol_type = other DNA
  modified_base order(1,2,3,10,14,15,16,17,19,23): mod_base = OTHER; note = Uracil
tttagaacctaacttttataggtta

SEQ ID NO: 1407 - DNA, 25 bp, synthetic construct
  misc_feature 1..25: note = Description of Artificial Sequence: Syntheticoligonucleotide
  misc_feature 1..25: note = Description of Combined DNA/RNA Molecule: Syntheticoligonucleotide
  source 1..25: mol_type = other DNA
  modified_base order(1,2,9,13,14,15,16,18,22,23): mod_base = OTHER; note = Uracil
ttagaacctaacttttataggttat

SEQ ID NO: 1408 - DNA, 25 bp, synthetic construct
  misc_feature 1..25: note = Description of Artificial Sequence: Syntheticoligonucleotide
  misc_feature 1..25: note = Description of Combined DNA/RNA Molecule: Syntheticoligonucleotide
  source 1..25: mol_type = other DNA
  modified_base order(1,8,12,13,14,15,17,21,22): mod_base = OTHER; note = Uracil
tagaacctaacttttataggttatc

SEQ ID NO: 1409 - RNA, 25 nt, synthetic construct
  misc_feature 1..25: note = Description of Artificial Sequence: Syntheticoligonucleotide
  source 1..25: mol_type = other RNA
agaacctaacttttataggttatca

SEQ ID NO: 1410 - RNA, 25 nt, synthetic construct
  misc_feature 1..25: note = Description of Artificial Sequence: Syntheticoligonucleotide
  source 1..25: mol_type = other RNA
ttataggttatcaaaactgttgtca

SEQ ID NO: 1411 - RNA, 25 nt, synthetic construct
  misc_feature 1..25: note = Description of Artificial Sequence: Syntheticoligonucleotide
  source 1..25: mol_type = other RNA
ataggttatcaaaactgttgtcacc

SEQ ID NO: 1412 - RNA, 25 nt, synthetic construct
  misc_feature 1..25: note = Description of Artificial Sequence: Syntheticoligonucleotide
  source 1..25: mol_type = other RNA
ttttgtcctaatatatacatagaaa

SEQ ID NO: 1413 - RNA, 25 nt, synthetic construct
  misc_feature 1..25: note = Description of Artificial Sequence: Syntheticoligonucleotide
  source 1..25: mol_type = other RNA
tttgtcctaatatatacatagaaac

SEQ ID NO: 1414 - DNA, 25 bp, synthetic construct
  misc_feature 1..25: note = Description of Artificial Sequence: Syntheticoligonucleotide
  misc_feature 1..25: note = Description of Combined DNA/RNA Molecule: Syntheticoligonucleotide
  source 1..25: mol_type = other DNA
  modified_base order(1,2,4,7,10,12,14,18): mod_base = OTHER; note = Uracil
ttgtcctaatatatacatagaaact

SEQ ID NO: 1415 - RNA, 25 nt, synthetic construct
  misc_feature 1..25: note = Description of Artificial Sequence: Syntheticoligonucleotide
  source 1..25: mol_type = other RNA
taatatatacatagaaactttgtgg

SEQ ID NO: 1416 - DNA, 25 bp, synthetic construct
  misc_feature 1..25: note = Description of Artificial Sequence: Syntheticoligonucleotide
  misc_feature 1..25: note = Description of Combined DNA/RNA Molecule: Syntheticoligonucleotide
  source 1..25: mol_type = other DNA
  modified_base order(1,3,7,14,15,16,18): mod_base = OTHER; note = Uracil
tatacatagaaactttgtggggcat

SEQ ID NO: 1417 - DNA, 25 bp, synthetic construct
  misc_feature 1..25: note = Description of Artificial Sequence: Syntheticoligonucleotide
  misc_feature 1..25: note = Description of Combined DNA/RNA Molecule: Syntheticoligonucleotide
  source 1..25: mol_type = other DNA
  modified_base order(5,6,9,11,14,15,16,18,20,21): mod_base = OTHER; note = Uracil
caagttcatctcatttgtattccat

SEQ ID NO: 1418 - DNA, 25 bp, synthetic construct
  misc_feature 1..25: note = Description of Artificial Sequence: Syntheticoligonucleotide
  misc_feature 1..25: note = Description of Combined DNA/RNA Molecule: Syntheticoligonucleotide
  source 1..25: mol_type = other DNA
  modified_base order(3,4,5,7,9,10,14,15,18,19,20,21,22,23): mod_base = OTHER; note = Uracil
catttgtattccattgatttttttt

SEQ ID NO: 1419 - DNA, 25 bp, synthetic construct
  misc_feature 1..25: note = Description of Artificial Sequence: Syntheticoligonucleotide
  misc_feature 1..25: note = Description of Combined DNA/RNA Molecule: Syntheticoligonucleotide
  source 1..25: mol_type = other DNA
  modified_base order(2,3,4,6,8,9,13,14,17,18,19,20,21,22,23): mod_base = OTHER; note = Uracil
atttgtattccattgattttttttt

SEQ ID NO: 1420 - DNA, 25 bp, synthetic construct
  misc_feature 1..25: note = Description of Artificial Sequence: Syntheticoligonucleotide
  misc_feature 1..25: note = Description of Combined DNA/RNA Molecule: Syntheticoligonucleotide
  source 1..25: mol_type = other DNA
  modified_base order(1,2,3,5,7,8,12,13,16,17,18,19,20,21,22,23): mod_base = OTHER; note = Uracil
tttgtattccattgatttttttttt

SEQ ID NO: 1421 - DNA, 25 bp, synthetic construct
  misc_feature 1..25: note = Description of Artificial Sequence: Syntheticoligonucleotide
  misc_feature 1..25: note = Description of Combined DNA/RNA Molecule: Syntheticoligonucleotide
  source 1..25: mol_type = other DNA
  modified_base order(1,2,4,6,7,11,12,15,16,17,18,19,20,21,22,23): mod_base = OTHER; note = Uracil
ttgtattccattgattttttttttc

SEQ ID NO: 1422 - DNA, 25 bp, synthetic construct
  misc_feature 1..25: note = Description of Artificial Sequence: Syntheticoligonucleotide
  misc_feature 1..25: note = Description of Combined DNA/RNA Molecule: Syntheticoligonucleotide
  source 1..25: mol_type = other DNA
  modified_base order(1,3,5,6,10,11,14,15,16,17,18,19,20,21,22,23): mod_base = OTHER; note = Uracil
tgtattccattgattttttttttct

SEQ ID NO: 1423 - DNA, 25 bp, synthetic construct
  misc_feature 1..25: note = Description of Artificial Sequence: Syntheticoligonucleotide
  misc_feature 1..25: note = Description of Combined DNA/RNA Molecule: Syntheticoligonucleotide
  source 1..25: mol_type = other DNA
  modified_base order(2,4,5,9,10,13,14,15,16,17,18,19,20,21,22): mod_base = OTHER; note = Uracil
gtattccattgattttttttttctt

SEQ ID NO: 1424 - DNA, 25 bp, synthetic construct
  misc_feature 1..25: note = Description of Artificial Sequence: Syntheticoligonucleotide
  misc_feature 1..25: note = Description of Combined DNA/RNA Molecule: Syntheticoligonucleotide
  source 1..25: mol_type = other DNA
  modified_base order(1,3,4,8,9,12,13,14,15,16,17,18,19,20,21,23): mod_base = OTHER; note = Uracil
tattccattgattttttttttcttc

SEQ ID NO: 1425 - DNA, 25 bp, synthetic construct
  misc_feature 1..25: note = Description of Artificial Sequence: Syntheticoligonucleotide
  misc_feature 1..25: note = Description of Combined DNA/RNA Molecule: Syntheticoligonucleotide
  source 1..25: mol_type = other DNA
  modified_base order(1,2,5,6,7,8,9,10,11,12,13,14,16,17,19): mod_base = OTHER; note = Uracil
ttgattttttttttcttctaaacat

SEQ ID NO: 1426 - DNA, 25 bp, synthetic construct
  misc_feature 1..25: note = Description of Artificial Sequence: Syntheticoligonucleotide
  misc_feature 1..25: note = Description of Combined DNA/RNA Molecule: Syntheticoligonucleotide
  source 1..25: mol_type = other DNA
  modified_base order(1,4,5,6,7,8,9,10,11,12,13,15,16,18): mod_base = OTHER; note = Uracil
tgattttttttttcttctaaacatt

SEQ ID NO: 1427 - DNA, 25 bp, synthetic construct
  misc_feature 1..25: note = Description of Artificial Sequence: Syntheticoligonucleotide
  misc_feature 1..25: note = Description of Combined DNA/RNA Molecule: Syntheticoligonucleotide
  source 1..25: mol_type = other DNA
  modified_base order(1,2,3,4,5,6,7,8,9,11,12,14,20,21,22,23): mod_base = OTHER; note = Uracil
tttttttttcttctaaacatttttt

SEQ ID NO: 1428 - DNA, 25 bp, synthetic construct
  misc_feature 1..25: note = Description of Artificial Sequence: Syntheticoligonucleotide
  misc_feature 1..25: note = Description of Combined DNA/RNA Molecule: Syntheticoligonucleotide
  source 1..25: mol_type = other DNA
  modified_base order(1,2,3,4,5,6,7,8,10,11,13,19,20,21,22,23): mod_base = OTHER; note = Uracil
ttttttttcttctaaacattttttc

SEQ ID NO: 1429 - DNA, 25 bp, synthetic construct
  misc_feature 1..25: note = Description of Artificial Sequence: Syntheticoligonucleotide
  misc_feature 1..25: note = Description of Combined DNA/RNA Molecule: Syntheticoligonucleotide
  source 1..25: mol_type = other DNA
  modified_base order(1,2,3,4,5,6,7,9,10,12,18,19,20,21,22,23): mod_base = OTHER; note = Uracil
tttttttcttctaaacattttttct

SEQ ID NO: 1430 - DNA, 25 bp, synthetic construct
  misc_feature 1..25: note = Description of Artificial Sequence: Syntheticoligonucleotide
  misc_feature 1..25: note = Description of Combined DNA/RNA Molecule: Syntheticoligonucleotide
  source 1..25: mol_type = other DNA
  modified_base order(1,2,3,4,5,6,8,9,11,17,18,19,20,21,22): mod_base = OTHER; note = Uracil
ttttttcttctaaacattttttctt

SEQ ID NO: 1431 - DNA, 25 bp, synthetic construct
  misc_feature 1..25: note = Description of Artificial Sequence: Syntheticoligonucleotide
  misc_feature 1..25: note = Description of Combined DNA/RNA Molecule: Syntheticoligonucleotide
  source 1..25: mol_type = other DNA
  modified_base order(1,2,3,4,5,7,8,10,16,17,18,19,20,21,23): mod_base = OTHER; note = Uracil
tttttcttctaaacattttttcttc

SEQ ID NO: 1432 - RNA, 25 nt, synthetic construct
  misc_feature 1..25: note = Description of Artificial Sequence: Syntheticoligonucleotide
  source 1..25: mol_type = other RNA
cattttttcttcaaacagtatataa

SEQ ID NO: 1433 - RNA, 25 nt, synthetic construct
  misc_feature 1..25: note = Description of Artificial Sequence: Syntheticoligonucleotide
  source 1..25: mol_type = other RNA
attttttcttcaaacagtatataac

SEQ ID NO: 1434 - DNA, 25 bp, synthetic construct
  misc_feature 1..25: note = Description of Artificial Sequence: Syntheticoligonucleotide
  misc_feature 1..25: note = Description of Combined DNA/RNA Molecule: Syntheticoligonucleotide
  source 1..25: mol_type = other DNA
  modified_base order(1,2,3,4,5,6,8,9,17,19,21): mod_base = OTHER; note = Uracil
ttttttcttcaaacagtatataact

SEQ ID NO: 1435 - DNA, 25 bp, synthetic construct
  misc_feature 1..25: note = Description of Artificial Sequence: Syntheticoligonucleotide
  misc_feature 1..25: note = Description of Combined DNA/RNA Molecule: Syntheticoligonucleotide
  source 1..25: mol_type = other DNA
  modified_base order(1,2,3,4,5,7,8,16,18,20): mod_base = OTHER; note = Uracil
tttttcttcaaacagtatataactt

SEQ ID NO: 1436 - DNA, 25 bp, synthetic construct
  misc_feature 1..25: note = Description of Artificial Sequence: Syntheticoligonucleotide
  misc_feature 1..25: note = Description of Combined DNA/RNA Molecule: Syntheticoligonucleotide
  source 1..25: mol_type = other DNA
  modified_base order(1,2,3,4,6,7,15,17,19,23): mod_base = OTHER; note = Uracil
ttttcttcaaacagtatataacttt

SEQ ID NO: 1437 - RNA, 25 nt, synthetic construct
  misc_feature 1..25: note = Description of Artificial Sequence: Syntheticoligonucleotide
  source 1..25: mol_type = other RNA
caaacagtatataactttttttagg

SEQ ID NO: 1438 - DNA, 25 bp, synthetic construct
  misc_feature 1..25: note = Description of Artificial Sequence: Syntheticoligonucleotide
  misc_feature 1..25: note = Description of Combined DNA/RNA Molecule: Syntheticoligonucleotide
  source 1..25: mol_type = other DNA
  modified_base order(3,5,7,11,12,13,14,15,16,17): mod_base = OTHER; note = Uracil
agtatataactttttttaggggatt

SEQ ID NO: 1439 - DNA, 25 bp, synthetic construct
  misc_feature 1..25: note = Description of Artificial Sequence: Syntheticoligonucleotide
  misc_feature 1..25: note = Description of Combined DNA/RNA Molecule: Syntheticoligonucleotide
  source 1..25: mol_type = other DNA
  modified_base order(2,4,6,10,11,12,13,14,15,16,23): mod_base = OTHER; note = Uracil
gtatataactttttttaggggattt

SEQ ID NO: 1440 - DNA, 25 bp, synthetic construct
  misc_feature 1..25: note = Description of Artificial Sequence: Syntheticoligonucleotide
  misc_feature 1..25: note = Description of Combined DNA/RNA Molecule: Syntheticoligonucleotide
  source 1..25: mol_type = other DNA
  modified_base order(1,3,5,9,10,11,12,13,14,15,22,23): mod_base = OTHER; note = Uracil
tatataactttttttaggggatttt

SEQ ID NO: 1441 - DNA, 25 bp, synthetic construct
  misc_feature 1..25: note = Description of Artificial Sequence: Syntheticoligonucleotide
  misc_feature 1..25: note = Description of Combined DNA/RNA Molecule: Syntheticoligonucleotide
  source 1..25: mol_type = other DNA
  modified_base order(2,4,8,9,10,11,12,13,14,21,22,23): mod_base = OTHER; note = Uracil
atataactttttttaggggattttt

SEQ ID NO: 1442 - RNA, 25 nt, synthetic construct
  misc_feature 1..25: note = Description of Artificial Sequence: Syntheticoligonucleotide
  source 1..25: mol_type = other RNA
ctttttttaggggatttttttttag

SEQ ID NO: 1443 - RNA, 25 nt, synthetic construct
  misc_feature 1..25: note = Description of Artificial Sequence: Syntheticoligonucleotide
  source 1..25: mol_type = other RNA
tttttttaggggatttttttttaga

SEQ ID NO: 1444 - DNA, 25 bp, synthetic construct
  misc_feature 1..25: note = Description of Artificial Sequence: Syntheticoligonucleotide
  misc_feature 1..25: note = Description of Combined DNA/RNA Molecule: Syntheticoligonucleotide
  source 1..25: mol_type = other DNA
  modified_base order(3,4,5,6,7,8,9,10,11): mod_base = OTHER; note = Uracil
gatttttttttagacagcaaaaact

SEQ ID NO: 1445 - DNA, 25 bp, synthetic construct
  misc_feature 1..25: note = Description of Artificial Sequence: Syntheticoligonucleotide
  misc_feature 1..25: note = Description of Combined DNA/RNA Molecule: Syntheticoligonucleotide
  source 1..25: mol_type = other DNA
  modified_base order(2,3,4,5,6,7,8,9,10): mod_base = OTHER; note = Uracil
atttttttttagacagcaaaaacta

SEQ ID NO: 1446 - DNA, 25 bp, synthetic construct
  misc_feature 1..25: note = Description of Artificial Sequence: Syntheticoligonucleotide
  misc_feature 1..25: note = Description of Combined DNA/RNA Molecule: Syntheticoligonucleotide
  source 1..25: mol_type = other DNA
  modified_base order(1,2,3,4,5,6,7,8,9,23): mod_base = OTHER; note = Uracil
tttttttttagacagcaaaaactat

SEQ ID NO: 1447 - RNA, 25 nt, synthetic construct
  misc_feature 1..25: note = Description of Artificial Sequence: Syntheticoligonucleotide
  source 1..25: mol_type = other RNA
aagatttccatttgtcaaaaagtaa

SEQ ID NO: 1448 - DNA, 25 bp, synthetic construct
  misc_feature 1..25: note = Description of Artificial Sequence: Syntheticoligonucleotide
  misc_feature 1..25: note = Description of Combined DNA/RNA Molecule: Syntheticoligonucleotide
  source 1..25: mol_type = other DNA
  modified_base order(4,5,6,10,11,12,14,22): mod_base = OTHER; note = Uracil
agatttccatttgtcaaaaagtaat

SEQ ID NO: 1449 - DNA, 25 bp, synthetic construct
  misc_feature 1..25: note = Description of Artificial Sequence: Syntheticoligonucleotide
  misc_feature 1..25: note = Description of Combined DNA/RNA Molecule: Syntheticoligonucleotide
  source 1..25: mol_type = other DNA
  modified_base order(3,4,5,9,10,11,13,21): mod_base = OTHER; note = Uracil
gatttccatttgtcaaaaagtaatg

SEQ ID NO: 1450 - RNA, 25 nt, synthetic construct
  misc_feature 1..25: note = Description of Artificial Sequence: Syntheticoligonucleotide
  source 1..25: mol_type = other RNA
atttccatttgtcaaaaagtaatga

SEQ ID NO: 1451 - DNA, 25 bp, synthetic construct
  misc_feature 1..25: note = Description of Artificial Sequence: Syntheticoligonucleotide
  misc_feature 1..25: note = Description of Combined DNA/RNA Molecule: Syntheticoligonucleotide
  source 1..25: mol_type = other DNA
  modified_base order(3,4,5,7,15,18,21,22,23): mod_base = OTHER; note = Uracil
catttgtcaaaaagtaatgatttct

SEQ ID NO: 1452 - DNA, 25 bp, synthetic construct
  misc_feature 1..25: note = Description of Artificial Sequence: Syntheticoligonucleotide
  misc_feature 1..25: note = Description of Combined DNA/RNA Molecule: Syntheticoligonucleotide
  source 1..25: mol_type = other DNA
  modified_base order(2,3,4,6,14,17,20,21,22): mod_base = OTHER; note = Uracil
atttgtcaaaaagtaatgatttctt

SEQ ID NO: 1453 - DNA, 25 bp, synthetic construct
  misc_feature 1..25: note = Description of Artificial Sequence: Syntheticoligonucleotide
  misc_feature 1..25: note = Description of Combined DNA/RNA Molecule: Syntheticoligonucleotide
  source 1..25: mol_type = other DNA
  modified_base order(1,2,3,5,13,16,19,20,21,23): mod_base = OTHER; note = Uracil
tttgtcaaaaagtaatgatttcttg

SEQ ID NO: 1454 - DNA, 25 bp, synthetic construct
  misc_feature 1..25: note = Description of Artificial Sequence: Syntheticoligonucleotide
  misc_feature 1..25: note = Description of Combined DNA/RNA Molecule: Syntheticoligonucleotide
  source 1..25: mol_type = other DNA
  modified_base order(8,11,14,15,16,18,19,22): mod_base = OTHER; note = Uracil
caaaaagtaatgatttcttgataat

SEQ ID NO: 1455 - DNA, 25 bp, synthetic construct
  misc_feature 1..25: note = Description of Artificial Sequence: Syntheticoligonucleotide
  misc_feature 1..25: note = Description of Combined DNA/RNA Molecule: Syntheticoligonucleotide
  source 1..25: mol_type = other DNA
  modified_base order(7,10,13,14,15,17,18,21): mod_base = OTHER; note = Uracil
aaaaagtaatgatttcttgataatt

SEQ ID NO: 1456 - DNA, 25 bp, synthetic construct
  misc_feature 1..25: note = Description of Artificial Sequence: Syntheticoligonucleotide
  misc_feature 1..25: note = Description of Combined DNA/RNA Molecule: Syntheticoligonucleotide
  source 1..25: mol_type = other DNA
  modified_base order(6,9,12,13,14,16,17,20,23): mod_base = OTHER; note = Uracil
aaaagtaatgatttcttgataattg

SEQ ID NO: 1457 - DNA, 25 bp, synthetic construct
  misc_feature 1..25: note = Description of Artificial Sequence: Syntheticoligonucleotide
  misc_feature 1..25: note = Description of Combined DNA/RNA Molecule: Syntheticoligonucleotide
  source 1..25: mol_type = other DNA
  modified_base order(5,8,11,12,13,15,16,19,22,23): mod_base = OTHER; note = Uracil
aaagtaatgatttcttgataattgt

SEQ ID NO: 1458 - DNA, 25 bp, synthetic construct
  misc_feature 1..25: note = Description of Artificial Sequence: Syntheticoligonucleotide
  misc_feature 1..25: note = Description of Combined DNA/RNA Molecule: Syntheticoligonucleotide
  source 1..25: mol_type = other DNA
  modified_base order(3,6,9,10,11,13,14,17,20,21,23): mod_base = OTHER; note = Uracil
agtaatgatttcttgataattgtgt

SEQ ID NO: 1459 - RNA, 25 nt, synthetic construct
  misc_feature 1..25: note = Description of Artificial Sequence: Syntheticoligonucleotide
  source 1..25: mol_type = other RNA
taatgatttcttgataattgtgtag

SEQ ID NO: 1460 - DNA, 25 bp, synthetic construct
  misc_feature 1..25: note = Description of Artificial Sequence: Syntheticoligonucleotide
  misc_feature 1..25: note = Description of Combined DNA/RNA Molecule: Syntheticoligonucleotide
  source 1..25: mol_type = other DNA
  modified_base order(3,6,7,8,10,11,14,17,18,20,22): mod_base = OTHER; note = Uracil
aatgatttcttgataattgtgtagt

SEQ ID NO: 1461 - RNA, 25 nt, synthetic construct
  misc_feature 1..25: note = Description of Artificial Sequence: Syntheticoligonucleotide
  source 1..25: mol_type = other RNA
tgatttcttgataattgtgtagtaa

SEQ ID NO: 1462 - DNA, 25 bp, synthetic construct
  misc_feature 1..25: note = Description of Artificial Sequence: Syntheticoligonucleotide
  misc_feature 1..25: note = Description of Combined DNA/RNA Molecule: Syntheticoligonucleotide
  source 1..25: mol_type = other DNA
  modified_base order(3,4,5,7,8,11,14,15,17,19,22): mod_base = OTHER; note = Uracil
gatttcttgataattgtgtagtaat

SEQ ID NO: 1463 - DNA, 25 bp, synthetic construct
  misc_feature 1..25: note = Description of Artificial Sequence: Syntheticoligonucleotide
  misc_feature 1..25: note = Description of Combined DNA/RNA Molecule: Syntheticoligonucleotide
  source 1..25: mol_type = other DNA
  modified_base order(2,3,6,9,10,12,14,17,20,22,23): mod_base = OTHER; note = Uracil
cttgataattgtgtagtaatgtttt

SEQ ID NO: 1464 - DNA, 25 bp, synthetic construct
  misc_feature 1..25: note = Description of Artificial Sequence: Syntheticoligonucleotide
  misc_feature 1..25: note = Description of Combined DNA/RNA Molecule: Syntheticoligonucleotide
  source 1..25: mol_type = other DNA
  modified_base order(1,2,5,8,9,11,13,16,19,21,22,23): mod_base = OTHER; note = Uracil
ttgataattgtgtagtaatgttttt

SEQ ID NO: 1465 - DNA, 25 bp, synthetic construct
  misc_feature 1..25: note = Description of Artificial Sequence: Syntheticoligonucleotide
  misc_feature 1..25: note = Description of Combined DNA/RNA Molecule: Syntheticoligonucleotide
  source 1..25: mol_type = other DNA
  modified_base order(1,4,7,8,10,12,15,18,20,21,22,23): mod_base = OTHER; note = Uracil
tgataattgtgtagtaatgtttttt

SEQ ID NO: 1466 - RNA, 25 nt, synthetic construct
  misc_feature 1..25: note = Description of Artificial Sequence: Syntheticoligonucleotide
  source 1..25: mol_type = other RNA
ataattgtgtagtaatgttttttag

SEQ ID NO: 1467 - RNA, 25 nt, synthetic construct
  misc_feature 1..25: note = Description of Artificial Sequence: Syntheticoligonucleotide
  source 1..25: mol_type = other RNA
attgtgtagtaatgttttttagaac

SEQ ID NO: 1468 - RNA, 25 nt, synthetic construct
  misc_feature 1..25: note = Description of Artificial Sequence: Syntheticoligonucleotide
  source 1..25: mol_type = other RNA
tgtgtagtaatgttttttagaaccc

SEQ ID NO: 1469 - RNA, 25 nt, synthetic construct
  misc_feature 1..25: note = Description of Artificial Sequence: Syntheticoligonucleotide
  source 1..25: mol_type = other RNA
gtgtagtaatgttttttagaaccca

SEQ ID NO: 1470 - RNA, 25 nt, synthetic construct
  misc_feature 1..25: note = Description of Artificial Sequence: Syntheticoligonucleotide
  source 1..25: mol_type = other RNA
ttaaagctgaatttatatttagtaa

SEQ ID NO: 1471 - DNA, 25 bp, synthetic construct
  misc_feature 1..25: note = Description of Artificial Sequence: Syntheticoligonucleotide
  misc_feature 1..25: note = Description of Combined DNA/RNA Molecule: Syntheticoligonucleotide
  source 1..25: mol_type = other DNA
  modified_base order(6,10,11,12,14,16,17,18,21): mod_base = OTHER; note = Uracil
aaagctgaatttatatttagtaact

SEQ ID NO: 1472 - DNA, 25 bp, synthetic construct
  misc_feature 1..25: note = Description of Artificial Sequence: Syntheticoligonucleotide
  misc_feature 1..25: note = Description of Combined DNA/RNA Molecule: Syntheticoligonucleotide
  source 1..25: mol_type = other DNA
  modified_base order(1,2,3,5,7,8,9,12,16,17,19,21,23): mod_base = OTHER; note = Uracil
tttatatttagtaacttctgtgtta

SEQ ID NO: 1473 - RNA, 25 nt, synthetic construct
  misc_feature 1..25: note = Description of Artificial Sequence: Syntheticoligonucleotide
  source 1..25: mol_type = other RNA
ttatatttagtaacttctgtgttaa

SEQ ID NO: 1474 - DNA, 25 bp, synthetic construct
  misc_feature 1..25: note = Description of Artificial Sequence: Syntheticoligonucleotide
  misc_feature 1..25: note = Description of Combined DNA/RNA Molecule: Syntheticoligonucleotide
  source 1..25: mol_type = other DNA
  modified_base order(1,3,5,6,7,10,14,15,17,19,21,22): mod_base = OTHER; note = Uracil
tatatttagtaacttctgtgttaat

SEQ ID NO: 1475 - RNA, 25 nt, synthetic construct
  misc_feature 1..25: note = Description of Artificial Sequence: Syntheticoligonucleotide
  source 1..25: mol_type = other RNA
ttagtaacttctgtgttaatactgg

SEQ ID NO: 1476 - DNA, 25 bp, synthetic construct
  misc_feature 1..25: note = Description of Artificial Sequence: Syntheticoligonucleotide
  misc_feature 1..25: note = Description of Combined DNA/RNA Molecule: Syntheticoligonucleotide
  source 1..25: mol_type = other DNA
  modified_base order(1,5,9,11,14,19): mod_base = OTHER; note = Uracil
tgaatagctgtcataaaatgaaact

SEQ ID NO: 1477 - DNA, 25 bp, synthetic construct
  misc_feature 1..25: note = Description of Artificial Sequence: Syntheticoligonucleotide
  misc_feature 1..25: note = Description of Combined DNA/RNA Molecule: Syntheticoligonucleotide
  source 1..25: mol_type = other DNA
  modified_base order(4,8,10,13,18): mod_base = OTHER; note = Uracil
gaatagctgtcataaaatgaaactt

SEQ ID NO: 1478 - RNA, 25 nt, synthetic construct
  misc_feature 1..25: note = Description of Artificial Sequence: Syntheticoligonucleotide
  source 1..25: mol_type = other RNA
aaatgaaactttctttctaaagaaa

SEQ ID NO: 1479 - RNA, 25 nt, synthetic construct
  misc_feature 1..25: note = Description of Artificial Sequence: Syntheticoligonucleotide
  source 1..25: mol_type = other RNA
aatgaaactttctttctaaagaaag

SEQ ID NO: 1480 - RNA, 25 nt, synthetic construct
  misc_feature 1..25: note = Description of Artificial Sequence: Syntheticoligonucleotide
  source 1..25: mol_type = other RNA
atgaaactttctttctaaagaaaga

SEQ ID NO: 1481 - DNA, 25 bp, synthetic construct
  misc_feature 1..25: note = Description of Artificial Sequence: Syntheticoligonucleotide
  misc_feature 1..25: note = Description of Combined DNA/RNA Molecule: Syntheticoligonucleotide
  source 1..25: mol_type = other DNA
  modified_base order(6,7,8,10,11,12,14): mod_base = OTHER; note = Uracil
gaaactttctttctaaagaaagata

SEQ ID NO: 1482 - RNA, 25 nt, synthetic construct
  misc_feature 1..25: note = Description of Artificial Sequence: Syntheticoligonucleotide
  source 1..25: mol_type = other RNA
ctttctttctaaagaaagatactca

SEQ ID NO: 1483 - DNA, 25 bp, synthetic construct
  misc_feature 1..25: note = Description of Artificial Sequence: Syntheticoligonucleotide
  misc_feature 1..25: note = Description of Combined DNA/RNA Molecule: Syntheticoligonucleotide
  source 1..25: mol_type = other DNA
  modified_base order(3,7,8,10,11,18,21): mod_base = OTHER; note = Uracil
catgagttcttgaagaatagtcata

SEQ ID NO: 1484 - DNA, 25 bp, synthetic construct
  misc_feature 1..25: note = Description of Artificial Sequence: Syntheticoligonucleotide
  misc_feature 1..25: note = Description of Combined DNA/RNA Molecule: Syntheticoligonucleotide
  source 1..25: mol_type = other DNA
  modified_base order(1,2,9,12,15,19,23): mod_base = OTHER; note = Uracil
ttgaagaatagtcataactagatta

SEQ ID NO: 1485 - RNA, 25 nt, synthetic construct
  misc_feature 1..25: note = Description of Artificial Sequence: Syntheticoligonucleotide
  source 1..25: mol_type = other RNA
tgaagaatagtcataactagattaa

SEQ ID NO: 1486 - RNA, 25 nt, synthetic construct
  misc_feature 1..25: note = Description of Artificial Sequence: Syntheticoligonucleotide
  source 1..25: mol_type = other RNA
gaagaatagtcataactagattaag

SEQ ID NO: 1487 - DNA, 25 bp, synthetic construct
  misc_feature 1..25: note = Description of Artificial Sequence: Syntheticoligonucleotide
  misc_feature 1..25: note = Description of Combined DNA/RNA Molecule: Syntheticoligonucleotide
  source 1..25: mol_type = other DNA
  modified_base order(4,7,10,14,18,19): mod_base = OTHER; note = Uracil
gaatagtcataactagattaagatc

SEQ ID NO: 1488 - DNA, 25 bp, synthetic construct
  misc_feature 1..25: note = Description of Artificial Sequence: Syntheticoligonucleotide
  misc_feature 1..25: note = Description of Combined DNA/RNA Molecule: Syntheticoligonucleotide
  source 1..25: mol_type = other DNA
  modified_base order(3,6,9,13,17,18,23): mod_base = OTHER; note = Uracil
aatagtcataactagattaagatct

SEQ ID NO: 1489 - DNA, 25 bp, synthetic construct
  misc_feature 1..25: note = Description of Artificial Sequence: Syntheticoligonucleotide
  misc_feature 1..25: note = Description of Combined DNA/RNA Molecule: Syntheticoligonucleotide
  source 1..25: mol_type = other DNA
  modified_base order(2,5,8,12,16,17,22): mod_base = OTHER; note = Uracil
atagtcataactagattaagatctg

SEQ ID NO: 1490 - DNA, 25 bp, synthetic construct
  misc_feature 1..25: note = Description of Artificial Sequence: Syntheticoligonucleotide
  misc_feature 1..25: note = Description of Combined DNA/RNA Molecule: Syntheticoligonucleotide
  source 1..25: mol_type = other DNA
  modified_base order(1,4,7,11,15,16,21,23): mod_base = OTHER; note = Uracil
tagtcataactagattaagatctgt

SEQ ID NO: 1491 - DNA, 25 bp, synthetic construct
  misc_feature 1..25: note = Description of Artificial Sequence: Syntheticoligonucleotide
  misc_feature 1..25: note = Description of Combined DNA/RNA Molecule: Syntheticoligonucleotide
  source 1..25: mol_type = other DNA
  modified_base order(3,7,11,12,17,19,21,23): mod_base = OTHER; note = Uracil
cataactagattaagatctgtgttt

SEQ ID NO: 1492 - DNA, 25 bp, synthetic construct
  misc_feature 1..25: note = Description of Artificial Sequence: Syntheticoligonucleotide
  misc_feature 1..25: note = Description of Combined DNA/RNA Molecule: Syntheticoligonucleotide
  source 1..25: mol_type = other DNA
  modified_base order(1,5,6,11,13,15,17,18,19,20,23): mod_base = OTHER; note = Uracil
tagattaagatctgtgttttagttt

SEQ ID NO: 1493 - RNA, 25 nt, synthetic construct
  misc_feature 1..25: note = Description of Artificial Sequence: Syntheticoligonucleotide
  source 1..25: mol_type = other RNA
gattaagatctgtgttttagtttaa

SEQ ID NO: 1494 - DNA, 25 bp, synthetic construct
  misc_feature 1..25: note = Description of Artificial Sequence: Syntheticoligonucleotide
  misc_feature 1..25: note = Description of Combined DNA/RNA Molecule: Syntheticoligonucleotide
  source 1..25: mol_type = other DNA
  modified_base order(2,3,8,10,12,14,15,16,17,20,21,22): mod_base = OTHER; note = Uracil
attaagatctgtgttttagtttaat

SEQ ID NO: 1495 - RNA, 25 nt, synthetic construct
  misc_feature 1..25: note = Description of Artificial Sequence: Syntheticoligonucleotide
  source 1..25: mol_type = other RNA
taagatctgtgttttagtttaatag

SEQ ID NO: 1496 - RNA, 25 nt, synthetic construct
  misc_feature 1..25: note = Description of Artificial Sequence: Syntheticoligonucleotide
  source 1..25: mol_type = other RNA
tgtgttttagtttaatagtttgaag

SEQ ID NO: 1497 - DNA, 25 bp, synthetic construct
  misc_feature 1..25: note = Description of Artificial Sequence: Syntheticoligonucleotide
  misc_feature 1..25: note = Description of Combined DNA/RNA Molecule: Syntheticoligonucleotide
  source 1..25: mol_type = other DNA
  modified_base order(2,4,5,6,7,10,11,12,15,18,19,20): mod_base = OTHER; note = Uracil
gtgttttagtttaatagtttgaagt

SEQ ID NO: 1498 - RNA, 25 nt, synthetic construct
  misc_feature 1..25: note = Description of Artificial Sequence: Syntheticoligonucleotide
  source 1..25: mol_type = other RNA
gttttagtttaatagtttgaagtgc

SEQ ID NO: 1499 - DNA, 25 bp, synthetic construct
  misc_feature 1..25: note = Description of Artificial Sequence: Syntheticoligonucleotide
  misc_feature 1..25: note = Description of Combined DNA/RNA Molecule: Syntheticoligonucleotide
  source 1..25: mol_type = other DNA
  modified_base order(1,2,3,6,7,8,11,14,15,16,21): mod_base = OTHER; note = Uracil
tttagtttaatagtttgaagtgcct

SEQ ID NO: 1500 - DNA, 25 bp, synthetic construct
  misc_feature 1..25: note = Description of Artificial Sequence: Syntheticoligonucleotide
  misc_feature 1..25: note = Description of Combined DNA/RNA Molecule: Syntheticoligonucleotide
  source 1..25: mol_type = other DNA
  modified_base order(1,2,5,6,7,10,13,14,15,20): mod_base = OTHER; note = Uracil
ttagtttaatagtttgaagtgcctg

SEQ ID NO: 1501 - RNA, 25 nt, synthetic construct
  misc_feature 1..25: note = Description of Artificial Sequence: Syntheticoligonucleotide
  source 1..25: mol_type = other RNA
ttgggataatgataggtaatttaga

SEQ ID NO: 1502 - DNA, 25 bp, synthetic construct
  misc_feature 1..25: note = Description of Artificial Sequence: Syntheticoligonucleotide
  misc_feature 1..25: note = Description of Combined DNA/RNA Molecule: Syntheticoligonucleotide
  source 1..25: mol_type = other DNA
  modified_base order(5,8,11,15,18,19,20): mod_base = OTHER; note = Uracil
gggataatgataggtaatttagatg

SEQ ID NO: 1503 - DNA, 25 bp, synthetic construct
  misc_feature 1..25: note = Description of Artificial Sequence: Syntheticoligonucleotide
  misc_feature 1..25: note = Description of Combined DNA/RNA Molecule: Syntheticoligonucleotide
  source 1..25: mol_type = other DNA
  modified_base order(2,5,8,12,15,16,17,21): mod_base = OTHER; note = Uracil
ataatgataggtaatttagatgaat

SEQ ID NO: 1504 - DNA, 25 bp, synthetic construct
  misc_feature 1..25: note = Description of Artificial Sequence: Syntheticoligonucleotide
  misc_feature 1..25: note = Description of Combined DNA/RNA Molecule: Syntheticoligonucleotide
  source 1..25: mol_type = other DNA
  modified_base order(1,4,7,11,14,15,16,20): mod_base = OTHER; note = Uracil
taatgataggtaatttagatgaatt

SEQ ID NO: 1505 - RNA, 25 nt, synthetic construct
  misc_feature 1..25: note = Description of Artificial Sequence: Syntheticoligonucleotide
  source 1..25: mol_type = other RNA
tgataggtaatttagatgaatttag

SEQ ID NO: 1506 - RNA, 25 nt, synthetic construct
  misc_feature 1..25: note = Description of Artificial Sequence: Syntheticoligonucleotide
  source 1..25: mol_type = other RNA
gataggtaatttagatgaatttagg

SEQ ID NO: 1507 - RNA, 25 nt, synthetic construct
  misc_feature 1..25: note = Description of Artificial Sequence: Syntheticoligonucleotide
  source 1..25: mol_type = other RNA
gtaatttagatgaatttaggggaaa

SEQ ID NO: 1508 - RNA, 25 nt, synthetic construct
  misc_feature 1..25: note = Description of Artificial Sequence: Syntheticoligonucleotide
  source 1..25: mol_type = other RNA
aatttagatgaatttaggggaaaaa

SEQ ID NO: 1509 - DNA, 25 bp, synthetic construct
  misc_feature 1..25: note = Description of Artificial Sequence: Syntheticoligonucleotide
  misc_feature 1..25: note = Description of Combined DNA/RNA Molecule: Syntheticoligonucleotide
  source 1..25: mol_type = other DNA
  modified_base order(2,6,7,8,23): mod_base = OTHER; note = Uracil
atgaatttaggggaaaaaaaagtta

SEQ ID NO: 1510 - DNA, 25 bp, synthetic construct
  misc_feature 1..25: note = Description of Artificial Sequence: Syntheticoligonucleotide
  misc_feature 1..25: note = Description of Combined DNA/RNA Molecule: Syntheticoligonucleotide
  source 1..25: mol_type = other DNA
  modified_base order(1,5,6,7,22,23): mod_base = OTHER; note = Uracil
tgaatttaggggaaaaaaaagttat

SEQ ID NO: 1511 - DNA, 25 bp, synthetic construct
  misc_feature 1..25: note = Description of Artificial Sequence: Syntheticoligonucleotide
  misc_feature 1..25: note = Description of Combined DNA/RNA Molecule: Syntheticoligonucleotide
  source 1..25: mol_type = other DNA
  modified_base order(11,12,14,16,22): mod_base = OTHER; note = Uracil
gaaaaaaaagttatctgcagatatg

SEQ ID NO: 1512 - DNA, 25 bp, synthetic construct
  misc_feature 1..25: note = Description of Artificial Sequence: Syntheticoligonucleotide
  misc_feature 1..25: note = Description of Combined DNA/RNA Molecule: Syntheticoligonucleotide
  source 1..25: mol_type = other DNA
  modified_base order(10,11,13,15,21,23): mod_base = OTHER; note = Uracil
aaaaaaaagttatctgcagatatgt

SEQ ID NO: 1513 - RNA, 25 nt, synthetic construct
  misc_feature 1..25: note = Description of Artificial Sequence: Syntheticoligonucleotide
  source 1..25: mol_type = other RNA
aaagttatctgcagatatgttgagg

SEQ ID NO: 1514 - DNA, 25 bp, synthetic construct
  misc_feature 1..25: note = Description of Artificial Sequence: Syntheticoligonucleotide
  misc_feature 1..25: note = Description of Combined DNA/RNA Molecule: Syntheticoligonucleotide
  source 1..25: mol_type = other DNA
  modified_base order(2,3,5,7,8,9,10,13,15,16,22): mod_base = OTHER; note = Uracil
cttgtgttttcatgttgaaaatact

SEQ ID NO: 1515 - DNA, 25 bp, synthetic construct
  misc_feature 1..25: note = Description of Artificial Sequence: Syntheticoligonucleotide
  misc_feature 1..25: note = Description of Combined DNA/RNA Molecule: Syntheticoligonucleotide
  source 1..25: mol_type = other DNA
  modified_base order(1,2,4,6,7,8,9,12,14,15,21): mod_base = OTHER; note = Uracil
ttgtgttttcatgttgaaaatactt

SEQ ID NO: 1516 - DNA, 25 bp, synthetic construct
  misc_feature 1..25: note = Description of Artificial Sequence: Syntheticoligonucleotide
  misc_feature 1..25: note = Description of Combined DNA/RNA Molecule: Syntheticoligonucleotide
  source 1..25: mol_type = other DNA
  modified_base order(1,3,5,6,7,8,11,13,14,20,23): mod_base = OTHER; note = Uracil
tgtgttttcatgttgaaaatacttt

SEQ ID NO: 1517 - DNA, 25 bp, synthetic construct
  misc_feature 1..25: note = Description of Artificial Sequence: Syntheticoligonucleotide
  misc_feature 1..25: note = Description of Combined DNA/RNA Molecule: Syntheticoligonucleotide
  source 1..25: mol_type = other DNA
  modified_base order(1,3,4,10,13,14,15,16,20,21,22,23): mod_base = OTHER; note = Uracil
tgttgaaaatacttttgcatttttc

SEQ ID NO: 1518 - RNA, 25 nt, synthetic construct
  misc_feature 1..25: note = Description of Artificial Sequence: Syntheticoligonucleotide
  source 1..25: mol_type = other RNA
gttgaaaatacttttgcatttttcc

SEQ ID NO: 1519 - DNA, 25 bp, synthetic construct
  misc_feature 1..25: note = Description of Artificial Sequence: Syntheticoligonucleotide
  misc_feature 1..25: note = Description of Combined DNA/RNA Molecule: Syntheticoligonucleotide
  source 1..25: mol_type = other DNA
  modified_base order(1,2,8,11,12,13,14,18,19,20,21,22): mod_base = OTHER; note = Uracil
ttgaaaatacttttgcatttttcct

SEQ ID NO: 1520 - DNA, 25 bp, synthetic construct
  misc_feature 1..25: note = Description of Artificial Sequence: Syntheticoligonucleotide
  misc_feature 1..25: note = Description of Combined DNA/RNA Molecule: Syntheticoligonucleotide
  source 1..25: mol_type = other DNA
  modified_base order(1,7,10,11,12,13,17,18,19,20,21): mod_base = OTHER; note = Uracil
tgaaaatacttttgcatttttcctt

SEQ ID NO: 1521 - RNA, 25 nt, synthetic construct
  misc_feature 1..25: note = Description of Artificial Sequence: Syntheticoligonucleotide
  source 1..25: mol_type = other RNA
tttgcatttttcctttgagtgccaa

SEQ ID NO: 1522 - DNA, 25 bp, synthetic construct
  misc_feature 1..25: note = Description of Artificial Sequence: Syntheticoligonucleotide
  misc_feature 1..25: note = Description of Combined DNA/RNA Molecule: Syntheticoligonucleotide
  source 1..25: mol_type = other DNA
  modified_base order(3,9,10,11,13,14,17,20,23): mod_base = OTHER; note = Uracil
agtgccaatttcttactagtactat

SEQ ID NO: 1523 - DNA, 25 bp, synthetic construct
  misc_feature 1..25: note = Description of Artificial Sequence: Syntheticoligonucleotide
  misc_feature 1..25: note = Description of Combined DNA/RNA Molecule: Syntheticoligonucleotide
  source 1..25: mol_type = other DNA
  modified_base order(4,5,6,8,9,12,15,18,20,21,22): mod_base = OTHER; note = Uracil
caatttcttactagtactatttctt

SEQ ID NO: 1524 - DNA, 25 bp, synthetic construct
  misc_feature 1..25: note = Description of Artificial Sequence: Syntheticoligonucleotide
  misc_feature 1..25: note = Description of Combined DNA/RNA Molecule: Syntheticoligonucleotide
  source 1..25: mol_type = other DNA
  modified_base order(3,4,5,7,8,11,14,17,19,20,21,23): mod_base = OTHER; note = Uracil
aatttcttactagtactatttctta

SEQ ID NO: 1525 - DNA, 25 bp, synthetic construct
  misc_feature 1..25: note = Description of Artificial Sequence: Syntheticoligonucleotide
  misc_feature 1..25: note = Description of Combined DNA/RNA Molecule: Syntheticoligonucleotide
  source 1..25: mol_type = other DNA
  modified_base order(2,5,8,10,11,12,14,15,18,20): mod_base = OTHER; note = Uracil
ctagtactatttcttaatgtaacat

SEQ ID NO: 1526 - DNA, 25 bp, synthetic construct
  misc_feature 1..25: note = Description of Artificial Sequence: Syntheticoligonucleotide
  misc_feature 1..25: note = Description of Combined DNA/RNA Molecule: Syntheticoligonucleotide
  source 1..25: mol_type = other DNA
  modified_base order(1,4,7,9,10,11,13,14,17,19): mod_base = OTHER; note = Uracil
tagtactatttcttaatgtaacatg

SEQ ID NO: 1527 - RNA, 25 nt, synthetic construct
  misc_feature 1..25: note = Description of Artificial Sequence: Syntheticoligonucleotide
  source 1..25: mol_type = other RNA
ctatttcttaatgtaacatgtttac

SEQ ID NO: 1528 - RNA, 25 nt, synthetic construct
  misc_feature 1..25: note = Description of Artificial Sequence: Syntheticoligonucleotide
  source 1..25: mol_type = other RNA
tatttcttaatgtaacatgtttacc

SEQ ID NO: 1529 - DNA, 25 bp, synthetic construct
  misc_feature 1..25: note = Description of Artificial Sequence: Syntheticoligonucleotide
  misc_feature 1..25: note = Description of Combined DNA/RNA Molecule: Syntheticoligonucleotide
  source 1..25: mol_type = other DNA
  modified_base order(2,3,4,6,7,10,12,17,19,20,21): mod_base = OTHER; note = Uracil
atttcttaatgtaacatgtttacct

SEQ ID NO: 1530 - DNA, 25 bp, synthetic construct
  misc_feature 1..25: note = Description of Artificial Sequence: Syntheticoligonucleotide
  misc_feature 1..25: note = Description of Combined DNA/RNA Molecule: Syntheticoligonucleotide
  source 1..25: mol_type = other DNA
  modified_base order(3,5,10,12,13,14,18,23): mod_base = OTHER; note = Uracil
aatgtaacatgtttacctggaatgt

SEQ ID NO: 1531 - DNA, 25 bp, synthetic construct
  misc_feature 1..25: note = Description of Artificial Sequence: Syntheticoligonucleotide
  misc_feature 1..25: note = Description of Combined DNA/RNA Molecule: Syntheticoligonucleotide
  source 1..25: mol_type = other DNA
  modified_base order(1,6,8,10,11,12,13,17,19,20,21,22,23): mod_base = OTHER; note = Uracil
tggaatgtattttaactatttttgt

SEQ ID NO: 1532 - DNA, 25 bp, synthetic construct
  misc_feature 1..25: note = Description of Artificial Sequence: Syntheticoligonucleotide
  misc_feature 1..25: note = Description of Combined DNA/RNA Molecule: Syntheticoligonucleotide
  source 1..25: mol_type = other DNA
  modified_base order(4,6,8,9,10,11,15,17,18,19,20,21,23): mod_base = OTHER; note = Uracil
gaatgtattttaactatttttgtat

SEQ ID NO: 1533 - DNA, 25 bp, synthetic construct
  misc_feature 1..25: note = Description of Artificial Sequence: Syntheticoligonucleotide
  misc_feature 1..25: note = Description of Combined DNA/RNA Molecule: Syntheticoligonucleotide
  source 1..25: mol_type = other DNA
  modified_base order(3,5,7,8,9,10,14,16,17,18,19,20,22): mod_base = OTHER; note = Uracil
aatgtattttaactatttttgtata

SEQ ID NO: 1534 - RNA, 25 nt, synthetic construct
  misc_feature 1..25: note = Description of Artificial Sequence: Syntheticoligonucleotide
  source 1..25: mol_type = other RNA
atgtattttaactatttttgtatag

SEQ ID NO: 1535 - DNA, 25 bp, synthetic construct
  misc_feature 1..25: note = Description of Artificial Sequence: Syntheticoligonucleotide
  misc_feature 1..25: note = Description of Combined DNA/RNA Molecule: Syntheticoligonucleotide
  source 1..25: mol_type = other DNA
  modified_base order(1,3,5,6,7,8,12,14,15,16,17,18,20,22): mod_base = OTHER; note = Uracil
tgtattttaactatttttgtatagt

SEQ ID NO: 1536 - DNA, 25 bp, synthetic construct
  misc_feature 1..25: note = Description of Artificial Sequence: Syntheticoligonucleotide
  misc_feature 1..25: note = Description of Combined DNA/RNA Molecule: Syntheticoligonucleotide
  source 1..25: mol_type = other DNA
  modified_base order(1,3,4,5,6,10,12,13,14,15,16,18,20,23): mod_base = OTHER; note = Uracil
tattttaactatttttgtatagtgt

SEQ ID NO: 1537 - RNA, 25 nt, synthetic construct
  misc_feature 1..25: note = Description of Artificial Sequence: Syntheticoligonucleotide
  source 1..25: mol_type = other RNA
ttttaactatttttgtatagtgtaa

SEQ ID NO: 1538 - RNA, 25 nt, synthetic construct
  misc_feature 1..25: note = Description of Artificial Sequence: Syntheticoligonucleotide
  source 1..25: mol_type = other RNA
tttaactatttttgtatagtgtaaa

SEQ ID NO: 1539 - RNA, 25 nt, synthetic construct
  misc_feature 1..25: note = Description of Artificial Sequence: Syntheticoligonucleotide
  source 1..25: mol_type = other RNA
ttaactatttttgtatagtgtaaac

SEQ ID NO: 1540 - RNA, 25 nt, synthetic construct
  misc_feature 1..25: note = Description of Artificial Sequence: Syntheticoligonucleotide
  source 1..25: mol_type = other RNA
tttttgtatagtgtaaactgaaaca

SEQ ID NO: 1541 - DNA, 25 bp, synthetic construct
  misc_feature 1..25: note = Description of Artificial Sequence: Syntheticoligonucleotide
  misc_feature 1..25: note = Description of Combined DNA/RNA Molecule: Syntheticoligonucleotide
  source 1..25: mol_type = other DNA
  modified_base order(1,2,3,4,6,8,11,13,18): mod_base = OTHER; note = Uracil
ttttgtatagtgtaaactgaaacat

SEQ ID NO: 1542 - DNA, 25 bp, synthetic construct
  misc_feature 1..25: note = Description of Artificial Sequence: Syntheticoligonucleotide
  misc_feature 1..25: note = Description of Combined DNA/RNA Molecule: Syntheticoligonucleotide
  source 1..25: mol_type = other DNA
  modified_base order(1,2,3,5,7,10,12,17): mod_base = OTHER; note = Uracil
tttgtatagtgtaaactgaaacatg

SEQ ID NO: 1543 - DNA, 25 bp, synthetic construct
  misc_feature 1..25: note = Description of Artificial Sequence: Syntheticoligonucleotide
  misc_feature 1..25: note = Description of Combined DNA/RNA Molecule: Syntheticoligonucleotide
  source 1..25: mol_type = other DNA
  modified_base order(2,9,15,16,17,18,20): mod_base = OTHER; note = Uracil
ctgaaacatgcacattttgtacatt

SEQ ID NO: 1544 - DNA, 25 bp, synthetic construct
  misc_feature 1..25: note = Description of Artificial Sequence: Syntheticoligonucleotide
  misc_feature 1..25: note = Description of Combined DNA/RNA Molecule: Syntheticoligonucleotide
  source 1..25: mol_type = other DNA
  modified_base order(3,9,10,11,12,14,18,19,21): mod_base = OTHER; note = Uracil
catgcacattttgtacattgtgctt

SEQ ID NO: 1545 - RNA, 25 nt, synthetic construct
  misc_feature 1..25: note = Description of Artificial Sequence: Syntheticoligonucleotide
  source 1..25: mol_type = other RNA
cagttgttttccatcatttggttgc

SEQ ID NO: 1546 - RNA, 25 nt, synthetic construct
  misc_feature 1..25: note = Description of Artificial Sequence: Syntheticoligonucleotide
  source 1..25: mol_type = other RNA
gttgttttccatcatttggttgcgc

SEQ ID NO: 1547 - DNA, 25 bp, synthetic construct
  misc_feature 1..25: note = Description of Artificial Sequence: Syntheticoligonucleotide
  misc_feature 1..25: note = Description of Combined DNA/RNA Molecule: Syntheticoligonucleotide
  source 1..25: mol_type = other DNA
  modified_base order(2,3,6,9,11,18,19): mod_base = OTHER; note = Uracil
gttggtcatatcaaacattaaaaat

SEQ ID NO: 1548 - DNA, 25 bp, synthetic construct
  misc_feature 1..25: note = Description of Artificial Sequence: Syntheticoligonucleotide
  misc_feature 1..25: note = Description of Combined DNA/RNA Molecule: Syntheticoligonucleotide
  source 1..25: mol_type = other DNA
  modified_base order(1,2,5,8,10,17,18): mod_base = OTHER; note = Uracil
ttggtcatatcaaacattaaaaatg

SEQ ID NO: 1549 - RNA, 25 nt, synthetic construct
  misc_feature 1..25: note = Description of Artificial Sequence: Syntheticoligonucleotide
  source 1..25: mol_type = other RNA
tggtcatatcaaacattaaaaatga

SEQ ID NO: 1550 - RNA, 25 nt, synthetic construct
  misc_feature 1..25: note = Description of Artificial Sequence: Syntheticoligonucleotide
  source 1..25: mol_type = other RNA
catatcaaacattaaaaatgaccac

SEQ ID NO: 1551 - DNA, 25 bp, synthetic construct
  misc_feature 1..25: note = Description of Artificial Sequence: Syntheticoligonucleotide
  misc_feature 1..25: note = Description of Combined DNA/RNA Molecule: Syntheticoligonucleotide
  source 1..25: mol_type = other DNA
  modified_base order(3,10,12,13,14,15,18,19): mod_base = OTHER; note = Uracil
aatgaccactcttttaattgaaatt

SEQ ID NO: 1552 - DNA, 25 bp, synthetic construct
  misc_feature 1..25: note = Description of Artificial Sequence: Syntheticoligonucleotide
  misc_feature 1..25: note = Description of Combined DNA/RNA Molecule: Syntheticoligonucleotide
  source 1..25: mol_type = other DNA
  modified_base order(2,9,11,12,13,14,17,18,23): mod_base = OTHER; note = Uracil
atgaccactcttttaattgaaatta

SEQ ID NO: 1553 - RNA, 25 nt, synthetic construct
  misc_feature 1..25: note = Description of Artificial Sequence: Syntheticoligonucleotide
  source 1..25: mol_type = other RNA
cttttaattgaaattaacttttaaa

SEQ ID NO: 1554 - DNA, 25 bp, synthetic construct
  misc_feature 1..25: note = Description of Artificial Sequence: Syntheticoligonucleotide
  misc_feature 1..25: note = Description of Combined DNA/RNA Molecule: Syntheticoligonucleotide
  source 1..25: mol_type = other DNA
  modified_base order(1,2,3,4,7,8,13,14,18,19,20,21): mod_base = OTHER; note = Uracil
ttttaattgaaattaacttttaaat

SEQ ID NO: 1555 - DNA, 25 bp, synthetic construct
  misc_feature 1..25: note = Description of Artificial Sequence: Syntheticoligonucleotide
  misc_feature 1..25: note = Description of Combined DNA/RNA Molecule: Syntheticoligonucleotide
  source 1..25: mol_type = other DNA
  modified_base order(1,2,5,6,11,12,16,17,18,19,23): mod_base = OTHER; note = Uracil
ttaattgaaattaacttttaaatgt

SEQ ID NO: 1556 - DNA, 25 bp, synthetic construct
  misc_feature 1..25: note = Description of Artificial Sequence: Syntheticoligonucleotide
  misc_feature 1..25: note = Description of Combined DNA/RNA Molecule: Syntheticoligonucleotide
  source 1..25: mol_type = other DNA
  modified_base order(3,4,9,10,14,15,16,17,21,23): mod_base = OTHER; note = Uracil
aattgaaattaacttttaaatgttt

SEQ ID NO: 1557 - DNA, 25 bp, synthetic construct
  misc_feature 1..25: note = Description of Artificial Sequence: Syntheticoligonucleotide
  misc_feature 1..25: note = Description of Combined DNA/RNA Molecule: Syntheticoligonucleotide
  source 1..25: mol_type = other DNA
  modified_base order(2,3,8,9,13,14,15,16,20,22,23): mod_base = OTHER; note = Uracil
attgaaattaacttttaaatgttta

SEQ ID NO: 1558 - DNA, 25 bp, synthetic construct
  misc_feature 1..25: note = Description of Artificial Sequence: Syntheticoligonucleotide
  misc_feature 1..25: note = Description of Combined DNA/RNA Molecule: Syntheticoligonucleotide
  source 1..25: mol_type = other DNA
  modified_base order(1,2,7,8,12,13,14,15,19,21,22,23): mod_base = OTHER; note = Uracil
ttgaaattaacttttaaatgtttat

SEQ ID NO: 1559 - DNA, 25 bp, synthetic construct
  misc_feature 1..25: note = Description of Artificial Sequence: Syntheticoligonucleotide
  misc_feature 1..25: note = Description of Combined DNA/RNA Molecule: Syntheticoligonucleotide
  source 1..25: mol_type = other DNA
  modified_base order(1,6,7,11,12,13,14,18,20,21,22): mod_base = OTHER; note = Uracil
tgaaattaacttttaaatgtttata

SEQ ID NO: 1560 - RNA, 25 nt, synthetic construct
  misc_feature 1..25: note = Description of Artificial Sequence: Syntheticoligonucleotide
  source 1..25: mol_type = other RNA
gaaattaacttttaaatgtttatag

SEQ ID NO: 1561 - RNA, 25 nt, synthetic construct
  misc_feature 1..25: note = Description of Artificial Sequence: Syntheticoligonucleotide
  source 1..25: mol_type = other RNA
aaattaacttttaaatgtttatagg

SEQ ID NO: 1562 - DNA, 25 bp, synthetic construct
  misc_feature 1..25: note = Description of Artificial Sequence: Syntheticoligonucleotide
  misc_feature 1..25: note = Description of Combined DNA/RNA Molecule: Syntheticoligonucleotide
  source 1..25: mol_type = other DNA
  modified_base order(1,2,6,7,8,9,13,15,16,17,19): mod_base = OTHER; note = Uracil
ttaacttttaaatgtttataggagt

SEQ ID NO: 1563 - DNA, 25 bp, synthetic construct
  misc_feature 1..25: note = Description of Artificial Sequence: Syntheticoligonucleotide
  misc_feature 1..25: note = Description of Combined DNA/RNA Molecule: Syntheticoligonucleotide
  source 1..25: mol_type = other DNA
  modified_base order(2,3,4,5,9,11,12,13,15,21,23): mod_base = OTHER; note = Uracil
cttttaaatgtttataggagtatgt

SEQ ID NO: 1564 - DNA, 25 bp, synthetic construct
  misc_feature 1..25: note = Description of Artificial Sequence: Syntheticoligonucleotide
  misc_feature 1..25: note = Description of Combined DNA/RNA Molecule: Syntheticoligonucleotide
  source 1..25: mol_type = other DNA
  modified_base order(1,5,7,8,9,11,17,19,21): mod_base = OTHER; note = Uracil
taaatgtttataggagtatgtgctg

SEQ ID NO: 1565 - DNA, 25 bp, synthetic construct
  misc_feature 1..25: note = Description of Artificial Sequence: Syntheticoligonucleotide
  misc_feature 1..25: note = Description of Combined DNA/RNA Molecule: Syntheticoligonucleotide
  source 1..25: mol_type = other DNA
  modified_base order(4,6,7,8,10,16,18,20,23): mod_base = OTHER; note = Uracil
aaatgtttataggagtatgtgctgt

SEQ ID NO: 1566 - DNA, 25 bp, synthetic construct
  misc_feature 1..25: note = Description of Artificial Sequence: Syntheticoligonucleotide
  misc_feature 1..25: note = Description of Combined DNA/RNA Molecule: Syntheticoligonucleotide
  source 1..25: mol_type = other DNA
  modified_base order(1,3,8,11,13,18,19,20,22): mod_base = OTHER; note = Uracil
tgtgaagtgatctaaaatttgtaat

SEQ ID NO: 1567 - DNA, 25 bp, synthetic construct
  misc_feature 1..25: note = Description of Artificial Sequence: Syntheticoligonucleotide
  misc_feature 1..25: note = Description of Combined DNA/RNA Molecule: Syntheticoligonucleotide
  source 1..25: mol_type = other DNA
  modified_base order(1,6,9,11,16,17,18,20,23): mod_base = OTHER; note = Uracil
tgaagtgatctaaaatttgtaatat

SEQ ID NO: 1568 - DNA, 25 bp, synthetic construct
  misc_feature 1..25: note = Description of Artificial Sequence: Syntheticoligonucleotide
  misc_feature 1..25: note = Description of Combined DNA/RNA Molecule: Syntheticoligonucleotide
  source 1..25: mol_type = other DNA
  modified_base order(5,8,10,15,16,17,19,22): mod_base = OTHER; note = Uracil
gaagtgatctaaaatttgtaatatt

SEQ ID NO: 1569 - DNA, 25 bp, synthetic construct
  misc_feature 1..25: note = Description of Artificial Sequence: Syntheticoligonucleotide
  misc_feature 1..25: note = Description of Combined DNA/RNA Molecule: Syntheticoligonucleotide
  source 1..25: mol_type = other DNA
  modified_base order(4,7,9,14,15,16,18,21,23): mod_base = OTHER; note = Uracil
aagtgatctaaaatttgtaatattt

SEQ ID NO: 1570 - DNA, 25 bp, synthetic construct
  misc_feature 1..25: note = Description of Artificial Sequence: Syntheticoligonucleotide
  misc_feature 1..25: note = Description of Combined DNA/RNA Molecule: Syntheticoligonucleotide
  source 1..25: mol_type = other DNA
  modified_base order(3,6,8,13,14,15,17,20,22,23): mod_base = OTHER; note = Uracil
agtgatctaaaatttgtaatatttt

SEQ ID NO: 1571 - DNA, 25 bp, synthetic construct
  misc_feature 1..25: note = Description of Artificial Sequence: Syntheticoligonucleotide
  misc_feature 1..25: note = Description of Combined DNA/RNA Molecule: Syntheticoligonucleotide
  source 1..25: mol_type = other DNA
  modified_base order(2,5,7,12,13,14,16,19,21,22,23): mod_base = OTHER; note = Uracil
gtgatctaaaatttgtaatattttt

SEQ ID NO: 1572 - DNA, 25 bp, synthetic construct
  misc_feature 1..25: note = Description of Artificial Sequence: Syntheticoligonucleotide
  misc_feature 1..25: note = Description of Combined DNA/RNA Molecule: Syntheticoligonucleotide
  source 1..25: mol_type = other DNA
  modified_base order(1,4,6,11,12,13,15,18,20,21,22,23): mod_base = OTHER; note = Uracil
tgatctaaaatttgtaatatttttg

SEQ ID NO: 1573 - DNA, 25 bp, synthetic construct
  misc_feature 1..25: note = Description of Artificial Sequence: Syntheticoligonucleotide
  misc_feature 1..25: note = Description of Combined DNA/RNA Molecule: Syntheticoligonucleotide
  source 1..25: mol_type = other DNA
  modified_base order(2,7,8,9,11,14,16,17,18,19,20,22): mod_base = OTHER; note = Uracil
ctaaaatttgtaatatttttgtcat

SEQ ID NO: 1574 - DNA, 25 bp, synthetic construct
  misc_feature 1..25: note = Description of Artificial Sequence: Syntheticoligonucleotide
  misc_feature 1..25: note = Description of Combined DNA/RNA Molecule: Syntheticoligonucleotide
  source 1..25: mol_type = other DNA
  modified_base order(1,6,7,8,10,13,15,16,17,18,19,21): mod_base = OTHER; note = Uracil
taaaatttgtaatatttttgtcatg

SEQ ID NO: 1575 - DNA, 25 bp, synthetic construct
  misc_feature 1..25: note = Description of Artificial Sequence: Syntheticoligonucleotide
  misc_feature 1..25: note = Description of Combined DNA/RNA Molecule: Syntheticoligonucleotide
  source 1..25: mol_type = other DNA
  modified_base order(2,3,4,6,9,11,12,13,14,15,17,20): mod_base = OTHER; note = Uracil
atttgtaatatttttgtcatgaact

SEQ ID NO: 1576 - DNA, 25 bp, synthetic construct
  misc_feature 1..25: note = Description of Artificial Sequence: Syntheticoligonucleotide
  misc_feature 1..25: note = Description of Combined DNA/RNA Molecule: Syntheticoligonucleotide
  source 1..25: mol_type = other DNA
  modified_base order(1,2,3,5,8,10,11,12,13,14,16,19): mod_base = OTHER; note = Uracil
tttgtaatatttttgtcatgaactg

SEQ ID NO: 1577 - DNA, 25 bp, synthetic construct
  misc_feature 1..25: note = Description of Artificial Sequence: Syntheticoligonucleotide
  misc_feature 1..25: note = Description of Combined DNA/RNA Molecule: Syntheticoligonucleotide
  source 1..25: mol_type = other DNA
  modified_base order(1,2,4,7,9,10,11,12,13,15,18,23): mod_base = OTHER; note = Uracil
ttgtaatatttttgtcatgaactgt

SEQ ID NO: 1578 - DNA, 25 bp, synthetic construct
  misc_feature 1..25: note = Description of Artificial Sequence: Syntheticoligonucleotide
  misc_feature 1..25: note = Description of Combined DNA/RNA Molecule: Syntheticoligonucleotide
  source 1..25: mol_type = other DNA
  modified_base order(3,5,6,7,8,9,11,14,19,21): mod_base = OTHER; note = Uracil
aatatttttgtcatgaactgtacta

SEQ ID NO: 1579 - RNA, 25 nt, synthetic construct
  misc_feature 1..25: note = Description of Artificial Sequence: Syntheticoligonucleotide
  source 1..25: mol_type = other RNA
atatttttgtcatgaactgtactac

SEQ ID NO: 1580 - DNA, 25 bp, synthetic construct
  misc_feature 1..25: note = Description of Artificial Sequence: Syntheticoligonucleotide
  misc_feature 1..25: note = Description of Combined DNA/RNA Molecule: Syntheticoligonucleotide
  source 1..25: mol_type = other DNA
  modified_base order(2,4,7,10,13,16,17,19,20,22): mod_base = OTHER; note = Uracil
ctgtactactcctaattattgtaat

SEQ ID NO: 1581 - DNA, 25 bp, synthetic construct
  misc_feature 1..25: note = Description of Artificial Sequence: Syntheticoligonucleotide
  misc_feature 1..25: note = Description of Combined DNA/RNA Molecule: Syntheticoligonucleotide
  source 1..25: mol_type = other DNA
  modified_base order(1,3,6,9,12,15,16,18,19,21): mod_base = OTHER; note = Uracil
tgtactactcctaattattgtaatg

SEQ ID NO: 1582 - DNA, 25 bp, synthetic construct
  misc_feature 1..25: note = Description of Artificial Sequence: Syntheticoligonucleotide
  misc_feature 1..25: note = Description of Combined DNA/RNA Molecule: Syntheticoligonucleotide
  source 1..25: mol_type = other DNA
  modified_base order(2,5,6,8,9,11,14,16,19): mod_base = OTHER; note = Uracil
ctaattattgtaatgtaataaaaat

SEQ ID NO: 1583 - DNA, 25 bp, synthetic construct
  misc_feature 1..25: note = Description of Artificial Sequence: Syntheticoligonucleotide
  misc_feature 1..25: note = Description of Combined DNA/RNA Molecule: Syntheticoligonucleotide
  source 1..25: mol_type = other DNA
  modified_base order(1,4,5,7,8,10,13,15,18): mod_base = OTHER; note = Uracil
taattattgtaatgtaataaaaata

SEQ ID NO: 1584 - DNA, 25 bp, synthetic construct
  misc_feature 1..25: note = Description of Artificial Sequence: Syntheticoligonucleotide
  misc_feature 1..25: note = Description of Combined DNA/RNA Molecule: Syntheticoligonucleotide
  source 1..25: mol_type = other DNA
  modified_base order(2,3,5,6,8,11,13,16,22): mod_base = OTHER; note = Uracil
attattgtaatgtaataaaaatagt

SEQ ID NO: 1585 - DNA, 25 bp, synthetic construct
  misc_feature 1..25: note = Description of Artificial Sequence: Syntheticoligonucleotide
  misc_feature 1..25: note = Description of Combined DNA/RNA Molecule: Syntheticoligonucleotide
  source 1..25: mol_type = other DNA
  modified_base order(1,3,4,6,9,11,14,20,23): mod_base = OTHER; note = Uracil
tattgtaatgtaataaaaatagtta

SEQ ID NO: 1586 - RNA, 25 nt, synthetic construct
  misc_feature 1..25: note = Description of Artificial Sequence: Syntheticoligonucleotide
  source 1..25: mol_type = other RNA
attgtaatgtaataaaaatagttac

SEQ ID NO: 1587 - RNA, 25 nt, synthetic construct
  misc_feature 1..25: note = Description of Artificial Sequence: Syntheticoligonucleotide
  source 1..25: mol_type = other RNA
tgtaatgtaataaaaatagttacag

SEQ ID NO: 1588 - DNA, 25 bp, synthetic construct
  misc_feature 1..25: note = Description of Artificial Sequence: Syntheticoligonucleotide
  misc_feature 1..25: note = Description of Combined DNA/RNA Molecule: Syntheticoligonucleotide
  source 1..25: mol_type = other DNA
  modified_base order(2,5,7,10,16,19,20): mod_base = OTHER; note = Uracil
gtaatgtaataaaaatagttacagt

SEQ ID NO: 1589 - RNA, 25 nt, synthetic construct
  misc_feature 1..25: note = Description of Artificial Sequence: Syntheticoligonucleotide
  source 1..25: mol_type = other RNA
tgtaataaaaatagttacagtgaca

SEQ ID NO: 1590 - RNA, 25 nt, synthetic construct
  misc_feature 1..25: note = Description of Artificial Sequence: Syntheticoligonucleotide
  source 1..25: mol_type = other RNA
gtaataaaaatagttacagtgacaa

SEQ ID NO: 1591 - RNA, 25 nt, synthetic construct
  misc_feature 1..25: note = Description of Artificial Sequence: Syntheticoligonucleotide
  source 1..25: mol_type = other RNA
taataaaaatagttacagtgacaaa

SEQ ID NO: 1592 - RNA, 25 nt, synthetic construct
  misc_feature 1..25: note = Description of Artificial Sequence: Syntheticoligonucleotide
  source 1..25: mol_type = other RNA
atagttacagtgacaaaaaaaaaaa

SEQ ID NO: 1593 - RNA, 25 nt, synthetic construct
  misc_feature 1..25: note = Description of Artificial Sequence: Syntheticoligonucleotide
  source 1..25: mol_type = other RNA
tagttacagtgacaaaaaaaaaaaa

SEQ ID NO: 1594 - RNA, 25 nt, synthetic construct
  misc_feature 1..25: note = Description of Artificial Sequence: Syntheticoligonucleotide
  source 1..25: mol_type = other RNA
gttacagtgacaaaaaaaaaaaaaa

SEQ ID NO: 1595 - DNA, 27 bp, Homo sapiens
  source 1..27: mol_type = other DNA
tgctgaaaatgactgaatataaacttg

SEQ ID NO: 1596 - DNA, 27 bp, Homo sapiens
  source 1..27: mol_type = other DNA
aaatgactgaatataaacttgtggtag

SEQ ID NO: 1597 - DNA, 27 bp, Homo sapiens
  source 1..27: mol_type = other DNA
gactgaatataaacttgtggtagttgg

SEQ ID NO: 1598 - DNA, 27 bp, Homo sapiens
  source 1..27: mol_type = other DNA
agctaattcagaatcattttgtggacg

SEQ ID NO: 1599 - DNA, 27 bp, Homo sapiens
  source 1..27: mol_type = other DNA
acgaatatgatccaacaatagaggatt

SEQ ID NO: 1600 - DNA, 27 bp, Homo sapiens
  source 1..27: mol_type = other DNA
agcaagtagtaattgatggagaaacct

SEQ ID NO: 1601 - DNA, 27 bp, Homo sapiens
  source 1..27: mol_type = other DNA
ggagggctttctttgtgtatttgccat

SEQ ID NO: 1602 - DNA, 27 bp, Homo sapiens
  source 1..27: mol_type = other DNA
tctttgtgtatttgccataaataatac

SEQ ID NO: 1603 - DNA, 27 bp, Homo sapiens
  source 1..27: mol_type = other DNA
ctttgtgtatttgccataaataatact

SEQ ID NO: 1604 - DNA, 27 bp, Homo sapiens
  source 1..27: mol_type = other DNA
tttgtgtatttgccataaataatacta

SEQ ID NO: 1605 - DNA, 27 bp, Homo sapiens
  source 1..27: mol_type = other DNA
ttgtgtatttgccataaataatactaa

SEQ ID NO: 1606 - DNA, 27 bp, Homo sapiens
  source 1..27: mol_type = other DNA
gtatttgccataaataatactaaatca

SEQ ID NO: 1607 - DNA, 27 bp, Homo sapiens
  source 1..27: mol_type = other DNA
tatttgccataaataatactaaatcat

SEQ ID NO: 1608 - DNA, 27 bp, Homo sapiens
  source 1..27: mol_type = other DNA
ccataaataatactaaatcatttgaag

SEQ ID NO: 1609 - DNA, 27 bp, Homo sapiens
  source 1..27: mol_type = other DNA
cataaataatactaaatcatttgaaga

SEQ ID NO: 1610 - DNA, 27 bp, Homo sapiens
  source 1..27: mol_type = other DNA
taaataatactaaatcatttgaagata

SEQ ID NO: 1611 - DNA, 27 bp, Homo sapiens
  source 1..27: mol_type = other DNA
aaataatactaaatcatttgaagatat

SEQ ID NO: 1612 - DNA, 27 bp, Homo sapiens
  source 1..27: mol_type = other DNA
aataatactaaatcatttgaagatatt

SEQ ID NO: 1613 - DNA, 27 bp, Homo sapiens
  source 1..27: mol_type = other DNA
ataatactaaatcatttgaagatattc

SEQ ID NO: 1614 - DNA, 27 bp, Homo sapiens
  source 1..27: mol_type = other DNA
atttgaagatattcaccattatagaga

SEQ ID NO: 1615 - DNA, 27 bp, Homo sapiens
  source 1..27: mol_type = other DNA
ttgaagatattcaccattatagagaac

SEQ ID NO: 1616 - DNA, 27 bp, Homo sapiens
  source 1..27: mol_type = other DNA
tgaagatattcaccattatagagaaca

SEQ ID NO: 1617 - DNA, 27 bp, Homo sapiens
  source 1..27: mol_type = other DNA
gaagatattcaccattatagagaacaa

SEQ ID NO: 1618 - DNA, 27 bp, Homo sapiens
  source 1..27: mol_type = other DNA
aagatattcaccattatagagaacaaa

SEQ ID NO: 1619 - DNA, 27 bp, Homo sapiens
  source 1..27: mol_type = other DNA
ccattatagagaacaaattaaaagagt

SEQ ID NO: 1620 - DNA, 27 bp, Homo sapiens
  source 1..27: mol_type = other DNA
attatagagaacaaattaaaagagtta

SEQ ID NO: 1621 - DNA, 27 bp, Homo sapiens
  source 1..27: mol_type = other DNA
ttatagagaacaaattaaaagagttaa

SEQ ID NO: 1622 - DNA, 27 bp, Homo sapiens
  source 1..27: mol_type = other DNA
tatagagaacaaattaaaagagttaag

SEQ ID NO: 1623 - DNA, 27 bp, Homo sapiens
  source 1..27: mol_type = other DNA
atagagaacaaattaaaagagttaagg

SEQ ID NO: 1624 - DNA, 27 bp, Homo sapiens
  source 1..27: mol_type = other DNA
ctagtaggaaataaatgtgatttgcct

SEQ ID NO: 1625 - DNA, 27 bp, Homo sapiens
  source 1..27: mol_type = other DNA
tagtaggaaataaatgtgatttgcctt

SEQ ID NO: 1626 - DNA, 27 bp, Homo sapiens
  source 1..27: mol_type = other DNA
aagaagttatggaattccttttattga

SEQ ID NO: 1627 - DNA, 27 bp, Homo sapiens
  source 1..27: mol_type = other DNA
aagttatggaattccttttattgaaac

SEQ ID NO: 1628 - DNA, 27 bp, Homo sapiens
  source 1..27: mol_type = other DNA
agttatggaattccttttattgaaaca

SEQ ID NO: 1629 - DNA, 27 bp, Homo sapiens
  source 1..27: mol_type = other DNA
gttatggaattccttttattgaaacat

SEQ ID NO: 1630 - DNA, 27 bp, Homo sapiens
  source 1..27: mol_type = other DNA
ttatggaattccttttattgaaacatc

SEQ ID NO: 1631 - DNA, 27 bp, Homo sapiens
  source 1..27: mol_type = other DNA
tggaggatgctttttatacattggtga

SEQ ID NO: 1632 - DNA, 27 bp, Homo sapiens
  source 1..27: mol_type = other DNA
gaggatgctttttatacattggtgagg

SEQ ID NO: 1633 - DNA, 27 bp, Homo sapiens
  source 1..27: mol_type = other DNA
acagattgaaaaaaatcagcaaagaag

SEQ ID NO: 1634 - DNA, 27 bp, Homo sapiens
  source 1..27: mol_type = other DNA
cagattgaaaaaaatcagcaaagaaga

SEQ ID NO: 1635 - DNA, 27 bp, Homo sapiens
  source 1..27: mol_type = other DNA
gattgaaaaaaatcagcaaagaagaaa

SEQ ID NO: 1636 - DNA, 27 bp, Homo sapiens
  source 1..27: mol_type = other DNA
attgaaaaaaatcagcaaagaagaaaa

SEQ ID NO: 1637 - DNA, 27 bp, Homo sapiens
  source 1..27: mol_type = other DNA
ttgaaaaaaatcagcaaagaagaaaag

SEQ ID NO: 1638 - DNA, 27 bp, Homo sapiens
  source 1..27: mol_type = other DNA
tgaaaaaaatcagcaaagaagaaaaga

SEQ ID NO: 1639 - DNA, 27 bp, Homo sapiens
  source 1..27: mol_type = other DNA
tcctggctgtgtgaaaattaaaaaatg

SEQ ID NO: 1640 - DNA, 27 bp, Homo sapiens
  source 1..27: mol_type = other DNA
ggctgtgtgaaaattaaaaaatgcatt

SEQ ID NO: 1641 - DNA, 27 bp, Homo sapiens
  source 1..27: mol_type = other DNA
gtgtgaaaattaaaaaatgcattataa

SEQ ID NO: 1642 - DNA, 27 bp, Homo sapiens
  source 1..27: mol_type = other DNA
tgtgaaaattaaaaaatgcattataat

SEQ ID NO: 1643 - DNA, 27 bp, Homo sapiens
  source 1..27: mol_type = other DNA
gtgaaaattaaaaaatgcattataatg

SEQ ID NO: 1644 - DNA, 27 bp, Homo sapiens
  source 1..27: mol_type = other DNA
tgaaaattaaaaaatgcattataatgt

SEQ ID NO: 1645 - DNA, 27 bp, Homo sapiens
  source 1..27: mol_type = other DNA
aaaattaaaaaatgcattataatgtaa

SEQ ID NO: 1646 - DNA, 27 bp, Homo sapiens
  source 1..27: mol_type = other DNA
aaattaaaaaatgcattataatgtaat

SEQ ID NO: 1647 - DNA, 27 bp, Homo sapiens
  source 1..27: mol_type = other DNA
aattaaaaaatgcattataatgtaatc

SEQ ID NO: 1648 - DNA, 27 bp, Homo sapiens
  source 1..27: mol_type = other DNA
attaaaaaatgcattataatgtaatct

SEQ ID NO: 1649 - DNA, 27 bp, Homo sapiens
  source 1..27: mol_type = other DNA
taaaaaatgcattataatgtaatctgg

SEQ ID NO: 1650 - DNA, 27 bp, Homo sapiens
  source 1..27: mol_type = other DNA
tgcattataatgtaatctgggtgttga

SEQ ID NO: 1651 - DNA, 27 bp, Homo sapiens
  source 1..27: mol_type = other DNA
ttcgagaaattcgaaaacataaagaaa

SEQ ID NO: 1652 - DNA, 27 bp, Homo sapiens
  source 1..27: mol_type = other DNA
tcgagaaattcgaaaacataaagaaaa

SEQ ID NO: 1653 - DNA, 27 bp, Homo sapiens
  source 1..27: mol_type = other DNA
cgagaaattcgaaaacataaagaaaag

SEQ ID NO: 1654 - DNA, 27 bp, Homo sapiens
  source 1..27: mol_type = other DNA
gaaattcgaaaacataaagaaaagatg

SEQ ID NO: 1655 - DNA, 27 bp, Homo sapiens
  source 1..27: mol_type = other DNA
tcgaaaacataaagaaaagatgagcaa

SEQ ID NO: 1656 - DNA, 27 bp, Homo sapiens
  source 1..27: mol_type = other DNA
cgaaaacataaagaaaagatgagcaaa

SEQ ID NO: 1657 - DNA, 27 bp, Homo sapiens
  source 1..27: mol_type = other DNA
aaagatggtaaaaagaagaaaaagaag

SEQ ID NO: 1658 - DNA, 27 bp, Homo sapiens
  source 1..27: mol_type = other DNA
aagatggtaaaaagaagaaaaagaagt

SEQ ID NO: 1659 - DNA, 27 bp, Homo sapiens
  source 1..27: mol_type = other DNA
gatggtaaaaagaagaaaaagaagtca

SEQ ID NO: 1660 - DNA, 27 bp, Homo sapiens
  source 1..27: mol_type = other DNA
atggtaaaaagaagaaaaagaagtcaa

SEQ ID NO: 1661 - DNA, 27 bp, Homo sapiens
  source 1..27: mol_type = other DNA
aaaaagaagaaaaagaagtcaaagaca

SEQ ID NO: 1662 - DNA, 27 bp, Homo sapiens
  source 1..27: mol_type = other DNA
aaaagaagaaaaagaagtcaaagacaa

SEQ ID NO: 1663 - DNA, 27 bp, Homo sapiens
  source 1..27: mol_type = other DNA
aaagaagaaaaagaagtcaaagacaaa

SEQ ID NO: 1664 - DNA, 27 bp, Homo sapiens
  source 1..27: mol_type = other DNA
tcaaagacaaagtgtgtaattatgtaa

SEQ ID NO: 1665 - DNA, 27 bp, Homo sapiens
  source 1..27: mol_type = other DNA
caaagacaaagtgtgtaattatgtaaa

SEQ ID NO: 1666 - DNA, 27 bp, Homo sapiens
  source 1..27: mol_type = other DNA
gacaaagtgtgtaattatgtaaataca

SEQ ID NO: 1667 - DNA, 27 bp, Homo sapiens
  source 1..27: mol_type = other DNA
caaagtgtgtaattatgtaaatacaat

SEQ ID NO: 1668 - DNA, 27 bp, Homo sapiens
  source 1..27: mol_type = other DNA
gtgtgtaattatgtaaatacaatttgt

SEQ ID NO: 1669 - DNA, 27 bp, Homo sapiens
  source 1..27: mol_type = other DNA
gtgtaattatgtaaatacaatttgtac

SEQ ID NO: 1670 - DNA, 27 bp, Homo sapiens
  source 1..27: mol_type = other DNA
gtaattatgtaaatacaatttgtactt

SEQ ID NO: 1671 - DNA, 27 bp, Homo sapiens
  source 1..27: mol_type = other DNA
taattatgtaaatacaatttgtacttt

SEQ ID NO: 1672 - DNA, 27 bp, Homo sapiens
  source 1..27: mol_type = other DNA
tatgtaaatacaatttgtacttttttc

SEQ ID NO: 1673 - DNA, 27 bp, Homo sapiens
  source 1..27: mol_type = other DNA
atgtaaatacaatttgtacttttttct

SEQ ID NO: 1674 - DNA, 27 bp, Homo sapiens
  source 1..27: mol_type = other DNA
gtaaatacaatttgtacttttttctta

SEQ ID NO: 1675 - DNA, 27 bp, Homo sapiens
  source 1..27: mol_type = other DNA
acaatttgtacttttttcttaaggcat

SEQ ID NO: 1676 - DNA, 27 bp, Homo sapiens
  source 1..27: mol_type = other DNA
caatttgtacttttttcttaaggcata

SEQ ID NO: 1677 - DNA, 27 bp, Homo sapiens
  source 1..27: mol_type = other DNA
tactagtacaagtggtaatttttgtac

SEQ ID NO: 1678 - DNA, 27 bp, Homo sapiens
  source 1..27: mol_type = other DNA
actagtacaagtggtaatttttgtaca

SEQ ID NO: 1679 - DNA, 27 bp, Homo sapiens
  source 1..27: mol_type = other DNA
acaagtggtaatttttgtacattacac

SEQ ID NO: 1680 - DNA, 27 bp, Homo sapiens
  source 1..27: mol_type = other DNA
caagtggtaatttttgtacattacact

SEQ ID NO: 1681 - DNA, 27 bp, Homo sapiens
  source 1..27: mol_type = other DNA
taatttttgtacattacactaaattat

SEQ ID NO: 1682 - DNA, 27 bp, Homo sapiens
  source 1..27: mol_type = other DNA
aatttttgtacattacactaaattatt

SEQ ID NO: 1683 - DNA, 27 bp, Homo sapiens
  source 1..27: mol_type = other DNA
atttttgtacattacactaaattatta

SEQ ID NO: 1684 - DNA, 27 bp, Homo sapiens
  source 1..27: mol_type = other DNA
tttttgtacattacactaaattattag

SEQ ID NO: 1685 - DNA, 27 bp, Homo sapiens
  source 1..27: mol_type = other DNA
ttttgtacattacactaaattattagc

SEQ ID NO: 1686 - DNA, 27 bp, Homo sapiens
  source 1..27: mol_type = other DNA
cactaaattattagcatttgttttagc

SEQ ID NO: 1687 - DNA, 27 bp, Homo sapiens
  source 1..27: mol_type = other DNA
ctaaattattagcatttgttttagcat

SEQ ID NO: 1688 - DNA, 27 bp, Homo sapiens
  source 1..27: mol_type = other DNA
taaattattagcatttgttttagcatt

SEQ ID NO: 1689 - DNA, 27 bp, Homo sapiens
  source 1..27: mol_type = other DNA
tattagcatttgttttagcattaccta

SEQ ID NO: 1690 - DNA, 27 bp, Homo sapiens
  source 1..27: mol_type = other DNA
catttgttttagcattacctaattttt

SEQ ID NO: 1691 - DNA, 27 bp, Homo sapiens
  source 1..27: mol_type = other DNA
atttgttttagcattacctaatttttt

SEQ ID NO: 1692 - DNA, 27 bp, Homo sapiens
  source 1..27: mol_type = other DNA
ttgttttagcattacctaatttttttc

SEQ ID NO: 1693 - DNA, 27 bp, Homo sapiens
  source 1..27: mol_type = other DNA
tgttttagcattacctaatttttttcc

SEQ ID NO: 1694 - DNA, 27 bp, Homo sapiens
  source 1..27: mol_type = other DNA
gttttagcattacctaatttttttcct

SEQ ID NO: 1695 - DNA, 27 bp, Homo sapiens
  source 1..27: mol_type = other DNA
ttttagcattacctaatttttttcctg

SEQ ID NO: 1696 - DNA, 27 bp, Homo sapiens
  source 1..27: mol_type = other DNA
gactgttagcttttaccttaaatgctt

SEQ ID NO: 1697 - DNA, 27 bp, Homo sapiens
  source 1..27: mol_type = other DNA
actgttagcttttaccttaaatgctta

SEQ ID NO: 1698 - DNA, 27 bp, Homo sapiens
  source 1..27: mol_type = other DNA
agcttttaccttaaatgcttattttaa

SEQ ID NO: 1699 - DNA, 27 bp, Homo sapiens
  source 1..27: mol_type = other DNA
gcttttaccttaaatgcttattttaaa

SEQ ID NO: 1700 - DNA, 27 bp, Homo sapiens
  source 1..27: mol_type = other DNA
cttttaccttaaatgcttattttaaaa

SEQ ID NO: 1701 - DNA, 27 bp, Homo sapiens
  source 1..27: mol_type = other DNA
ccttaaatgcttattttaaaatgacag

SEQ ID NO: 1702 - DNA, 27 bp, Homo sapiens
  source 1..27: mol_type = other DNA
ccttaaatgcttattttaaaatgacag

SEQ ID NO: 1703 - DNA, 27 bp, Homo sapiens
  source 1..27: mol_type = other DNA
cttaaatgcttattttaaaatgacagt

SEQ ID NO: 1704 - DNA, 27 bp, Homo sapiens
  source 1..27: mol_type = other DNA
tgcttattttaaaatgacagtggaagt

SEQ ID NO: 1705 - DNA, 27 bp, Homo sapiens
  source 1..27: mol_type = other DNA
cttattttaaaatgacagtggaagttt

SEQ ID NO: 1706 - DNA, 27 bp, Homo sapiens
  source 1..27: mol_type = other DNA
gtggaagtttttttttcctctaagtgc

SEQ ID NO: 1707 - DNA, 27 bp, Homo sapiens
  source 1..27: mol_type = other DNA
ggaagtttttttttcctctaagtgcca

SEQ ID NO: 1708 - DNA, 27 bp, Homo sapiens
  source 1..27: mol_type = other DNA
gaagtttttttttcctctaagtgccag

SEQ ID NO: 1709 - DNA, 27 bp, Homo sapiens
  source 1..27: mol_type = other DNA
ttttggtttttgaactagcaatgcctg

SEQ ID NO: 1710 - DNA, 27 bp, Homo sapiens
  source 1..27: mol_type = other DNA
gcctgtgaaaaagaaactgaataccta

SEQ ID NO: 1711 - DNA, 27 bp, Homo sapiens
  source 1..27: mol_type = other DNA
aaaaagaaactgaatacctaagatttc

SEQ ID NO: 1712 - DNA, 27 bp, Homo sapiens
  source 1..27: mol_type = other DNA
aaaagaaactgaatacctaagatttct

SEQ ID NO: 1713 - DNA, 27 bp, Homo sapiens
  source 1..27: mol_type = other DNA
aactgaatacctaagatttctgtcttg

SEQ ID NO: 1714 - DNA, 27 bp, Homo sapiens
  source 1..27: mol_type = other DNA
tgcagttgattacttcttatttttctt

SEQ ID NO: 1715 - DNA, 27 bp, Homo sapiens
  source 1..27: mol_type = other DNA
gcagttgattacttcttatttttctta

SEQ ID NO: 1716 - DNA, 27 bp, Homo sapiens
  source 1..27: mol_type = other DNA
ttgattacttcttatttttcttaccaa

SEQ ID NO: 1717 - DNA, 27 bp, Homo sapiens
  source 1..27: mol_type = other DNA
ttcttatttttcttaccaattgtgaat

SEQ ID NO: 1718 - DNA, 27 bp, Homo sapiens
  source 1..27: mol_type = other DNA
tcttatttttcttaccaattgtgaatg

SEQ ID NO: 1719 - DNA, 27 bp, Homo sapiens
  source 1..27: mol_type = other DNA
cttatttttcttaccaattgtgaatgt

SEQ ID NO: 1720 - DNA, 27 bp, Homo sapiens
  source 1..27: mol_type = other DNA
atgttggtgtgaaacaaattaatgaag

SEQ ID NO: 1721 - DNA, 27 bp, Homo sapiens
  source 1..27: mol_type = other DNA
ttggtgtgaaacaaattaatgaagctt

SEQ ID NO: 1722 - DNA, 27 bp, Homo sapiens
  source 1..27: mol_type = other DNA
tggtgtgaaacaaattaatgaagcttt

SEQ ID NO: 1723 - DNA, 27 bp, Homo sapiens
  source 1..27: mol_type = other DNA
aacaaattaatgaagcttttgaatcat

SEQ ID NO: 1724 - DNA, 27 bp, Homo sapiens
  source 1..27: mol_type = other DNA
acaaattaatgaagcttttgaatcatc

SEQ ID NO: 1725 - DNA, 27 bp, Homo sapiens
  source 1..27: mol_type = other DNA
tctgtgttttatctagtcacataaatg

SEQ ID NO: 1726 - DNA, 27 bp, Homo sapiens
  source 1..27: mol_type = other DNA
ctgtgttttatctagtcacataaatgg

SEQ ID NO: 1727 - DNA, 27 bp, Homo sapiens
  source 1..27: mol_type = other DNA
tgttttatctagtcacataaatggatt

SEQ ID NO: 1728 - DNA, 27 bp, Homo sapiens
  source 1..27: mol_type = other DNA
gttttatctagtcacataaatggatta

SEQ ID NO: 1729 - DNA, 27 bp, Homo sapiens
  source 1..27: mol_type = other DNA
atctagtcacataaatggattaattac

SEQ ID NO: 1730 - DNA, 27 bp, Homo sapiens
  source 1..27: mol_type = other DNA
tctagtcacataaatggattaattact

SEQ ID NO: 1731 - DNA, 27 bp, Homo sapiens
  source 1..27: mol_type = other DNA
cataaatggattaattactaatttcag

SEQ ID NO: 1732 - DNA, 27 bp, Homo sapiens
  source 1..27: mol_type = other DNA
ataaatggattaattactaatttcagt

SEQ ID NO: 1733 - DNA, 27 bp, Homo sapiens
  source 1..27: mol_type = other DNA
tggattaattactaatttcagttgaga

SEQ ID NO: 1734 - DNA, 27 bp, Homo sapiens
  source 1..27: mol_type = other DNA
gattaattactaatttcagttgagacc

SEQ ID NO: 1735 - DNA, 27 bp, Homo sapiens
  source 1..27: mol_type = other DNA
attaattactaatttcagttgagacct

SEQ ID NO: 1736 - DNA, 27 bp, Homo sapiens
  source 1..27: mol_type = other DNA
ttaattactaatttcagttgagacctt

SEQ ID NO: 1737 - DNA, 27 bp, Homo sapiens
  source 1..27: mol_type = other DNA
taattggtttttactgaaacattgagg

SEQ ID NO: 1738 - DNA, 27 bp, Homo sapiens
  source 1..27: mol_type = other DNA
tggtttttactgaaacattgagggaac

SEQ ID NO: 1739 - DNA, 27 bp, Homo sapiens
  source 1..27: mol_type = other DNA
ggtttttactgaaacattgagggaaca

SEQ ID NO: 1740 - DNA, 27 bp, Homo sapiens
  source 1..27: mol_type = other DNA
attgagggaacacaaatttatgggctt

SEQ ID NO: 1741 - DNA, 27 bp, Homo sapiens
  source 1..27: mol_type = other DNA
ttgagggaacacaaatttatgggcttc

SEQ ID NO: 1742 - DNA, 27 bp, Homo sapiens
  source 1..27: mol_type = other DNA
tgatgaatgtaaagttacactgttcac

SEQ ID NO: 1743 - DNA, 27 bp, Homo sapiens
  source 1..27: mol_type = other DNA
gatgaatgtaaagttacactgttcaca

SEQ ID NO: 1744 - DNA, 27 bp, Homo sapiens
  source 1..27: mol_type = other DNA
ccaaaatattatattttttctataaaa

SEQ ID NO: 1745 - DNA, 27 bp, Homo sapiens
  source 1..27: mol_type = other DNA
caaaatattatattttttctataaaaa

SEQ ID NO: 1746 - DNA, 27 bp, Homo sapiens
  source 1..27: mol_type = other DNA
aaaatattatattttttctataaaaag

SEQ ID NO: 1747 - DNA, 27 bp, Homo sapiens
  source 1..27: mol_type = other DNA
aaatattatattttttctataaaaaga

SEQ ID NO: 1748 - DNA, 27 bp, Homo sapiens
  source 1..27: mol_type = other DNA
atattatattttttctataaaaagaaa

SEQ ID NO: 1749 - DNA, 27 bp, Homo sapiens
  source 1..27: mol_type = other DNA
tattatattttttctataaaaagaaaa

SEQ ID NO: 1750 - DNA, 27 bp, Homo sapiens
  source 1..27: mol_type = other DNA
attatattttttctataaaaagaaaaa

SEQ ID NO: 1751 - DNA, 27 bp, Homo sapiens
  source 1..27: mol_type = other DNA
ttatattttttctataaaaagaaaaaa

SEQ ID NO: 1752 - DNA, 27 bp, Homo sapiens
  source 1..27: mol_type = other DNA
tatattttttctataaaaagaaaaaaa

SEQ ID NO: 1753 - DNA, 27 bp, Homo sapiens
  source 1..27: mol_type = other DNA
atattttttctataaaaagaaaaaaat

SEQ ID NO: 1754 - DNA, 27 bp, Homo sapiens
  source 1..27: mol_type = other DNA
tattttttctataaaaagaaaaaaatg

SEQ ID NO: 1755 - DNA, 27 bp, Homo sapiens
  source 1..27: mol_type = other DNA
attttttctataaaaagaaaaaaatgg

SEQ ID NO: 1756 - DNA, 27 bp, Homo sapiens
  source 1..27: mol_type = other DNA
ttctataaaaagaaaaaaatggaaaaa

SEQ ID NO: 1757 - DNA, 27 bp, Homo sapiens
  source 1..27: mol_type = other DNA
tctataaaaagaaaaaaatggaaaaaa

SEQ ID NO: 1758 - DNA, 27 bp, Homo sapiens
  source 1..27: mol_type = other DNA
tataaaaagaaaaaaatggaaaaaaat

SEQ ID NO: 1759 - DNA, 27 bp, Homo sapiens
  source 1..27: mol_type = other DNA
ataaaaagaaaaaaatggaaaaaaatt

SEQ ID NO: 1760 - DNA, 27 bp, Homo sapiens
  source 1..27: mol_type = other DNA
taaaaagaaaaaaatggaaaaaaatta

SEQ ID NO: 1761 - DNA, 27 bp, Homo sapiens
  source 1..27: mol_type = other DNA
aaaaagaaaaaaatggaaaaaaattac

SEQ ID NO: 1762 - DNA, 27 bp, Homo sapiens
  source 1..27: mol_type = other DNA
aaaagaaaaaaatggaaaaaaattaca

SEQ ID NO: 1763 - DNA, 27 bp, Homo sapiens
  source 1..27: mol_type = other DNA
aaagaaaaaaatggaaaaaaattacaa

SEQ ID NO: 1764 - DNA, 27 bp, Homo sapiens
  source 1..27: mol_type = other DNA
aagaaaaaaatggaaaaaaattacaag

SEQ ID NO: 1765 - DNA, 27 bp, Homo sapiens
  source 1..27: mol_type = other DNA
aaaaaatggaaaaaaattacaaggcaa

SEQ ID NO: 1766 - DNA, 27 bp, Homo sapiens
  source 1..27: mol_type = other DNA
aaaaatggaaaaaaattacaaggcaat

SEQ ID NO: 1767 - DNA, 27 bp, Homo sapiens
  source 1..27: mol_type = other DNA
tggaaaaaaattacaaggcaatggaaa

SEQ ID NO: 1768 - DNA, 27 bp, Homo sapiens
  source 1..27: mol_type = other DNA
ggaaaaaaattacaaggcaatggaaac

SEQ ID NO: 1769 - DNA, 27 bp, Homo sapiens
  source 1..27: mol_type = other DNA
gaaaaaaattacaaggcaatggaaact

SEQ ID NO: 1770 - DNA, 27 bp, Homo sapiens
  source 1..27: mol_type = other DNA
gccatttccttttcacattagataaat

SEQ ID NO: 1771 - DNA, 27 bp, Homo sapiens
  source 1..27: mol_type = other DNA
tccttttcacattagataaattactat

SEQ ID NO: 1772 - DNA, 27 bp, Homo sapiens
  source 1..27: mol_type = other DNA
cacattagataaattactataaagact

SEQ ID NO: 1773 - DNA, 27 bp, Homo sapiens
  source 1..27: mol_type = other DNA
acattagataaattactataaagactc

SEQ ID NO: 1774 - DNA, 27 bp, Homo sapiens
  source 1..27: mol_type = other DNA
cattagataaattactataaagactcc

SEQ ID NO: 1775 - DNA, 27 bp, Homo sapiens
  source 1..27: mol_type = other DNA
agtatgaaatggggattattatagcaa

SEQ ID NO: 1776 - DNA, 27 bp, Homo sapiens
  source 1..27: mol_type = other DNA
tggggattattatagcaaccattttgg

SEQ ID NO: 1777 - DNA, 27 bp, Homo sapiens
  source 1..27: mol_type = other DNA
ggctatatttacatgctactaaatttt

SEQ ID NO: 1778 - DNA, 27 bp, Homo sapiens
  source 1..27: mol_type = other DNA
gctatatttacatgctactaaattttt

SEQ ID NO: 1779 - DNA, 27 bp, Homo sapiens
  source 1..27: mol_type = other DNA
ctatatttacatgctactaaattttta

SEQ ID NO: 1780 - DNA, 27 bp, Homo sapiens
  source 1..27: mol_type = other DNA
tatatttacatgctactaaatttttat

SEQ ID NO: 1781 - DNA, 27 bp, Homo sapiens
  source 1..27: mol_type = other DNA
atatttacatgctactaaatttttata

SEQ ID NO: 1782 - DNA, 27 bp, Homo sapiens
  source 1..27: mol_type = other DNA
tacatgctactaaatttttataataat

SEQ ID NO: 1783 - DNA, 27 bp, Homo sapiens
  source 1..27: mol_type = other DNA
tactaaatttttataataattgaaaag

SEQ ID NO: 1784 - DNA, 27 bp, Homo sapiens
  source 1..27: mol_type = other DNA
actaaatttttataataattgaaaaga

SEQ ID NO: 1785 - DNA, 27 bp, Homo sapiens
  source 1..27: mol_type = other DNA
taaatttttataataattgaaaagatt

SEQ ID NO: 1786 - DNA, 27 bp, Homo sapiens
  source 1..27: mol_type = other DNA
aaatttttataataattgaaaagattt

SEQ ID NO: 1787 - DNA, 27 bp, Homo sapiens
  source 1..27: mol_type = other DNA
aatttttataataattgaaaagatttt

SEQ ID NO: 1788 - DNA, 27 bp, Homo sapiens
  source 1..27: mol_type = other DNA
atttttataataattgaaaagatttta

SEQ ID NO: 1789 - DNA, 27 bp, Homo sapiens
  source 1..27: mol_type = other DNA
tttttataataattgaaaagattttaa

SEQ ID NO: 1790 - DNA, 27 bp, Homo sapiens
  source 1..27: mol_type = other DNA
ttttataataattgaaaagattttaac

SEQ ID NO: 1791 - DNA, 27 bp, Homo sapiens
  source 1..27: mol_type = other DNA
tttataataattgaaaagattttaaca

SEQ ID NO: 1792 - DNA, 27 bp, Homo sapiens
  source 1..27: mol_type = other DNA
ttataataattgaaaagattttaacaa

SEQ ID NO: 1793 - DNA, 27 bp, Homo sapiens
  source 1..27: mol_type = other DNA
tataataattgaaaagattttaacaag

SEQ ID NO: 1794 - DNA, 27 bp, Homo sapiens
  source 1..27: mol_type = other DNA
ataattgaaaagattttaacaagtata

SEQ ID NO: 1795 - DNA, 27 bp, Homo sapiens
  source 1..27: mol_type = other DNA
taattgaaaagattttaacaagtataa

SEQ ID NO: 1796 - DNA, 27 bp, Homo sapiens
  source 1..27: mol_type = other DNA
attgaaaagattttaacaagtataaaa

SEQ ID NO: 1797 - DNA, 27 bp, Homo sapiens
  source 1..27: mol_type = other DNA
ttgaaaagattttaacaagtataaaaa

SEQ ID NO: 1798 - DNA, 27 bp, Homo sapiens
  source 1..27: mol_type = other DNA
tgaaaagattttaacaagtataaaaaa

SEQ ID NO: 1799 - DNA, 27 bp, Homo sapiens
  source 1..27: mol_type = other DNA
gaaaagattttaacaagtataaaaaat

SEQ ID NO: 1800 - DNA, 27 bp, Homo sapiens
  source 1..27: mol_type = other DNA
aaaagattttaacaagtataaaaaatt

SEQ ID NO: 1801 - DNA, 27 bp, Homo sapiens
  source 1..27: mol_type = other DNA
aaagattttaacaagtataaaaaattc

SEQ ID NO: 1802 - DNA, 27 bp, Homo sapiens
  source 1..27: mol_type = other DNA
aagattttaacaagtataaaaaattct

SEQ ID NO: 1803 - DNA, 27 bp, Homo sapiens
  source 1..27: mol_type = other DNA
agattttaacaagtataaaaaattctc

SEQ ID NO: 1804 - DNA, 27 bp, Homo sapiens
  source 1..27: mol_type = other DNA
gattttaacaagtataaaaaattctca

SEQ ID NO: 1805 - DNA, 27 bp, Homo sapiens
  source 1..27: mol_type = other DNA
acaagtataaaaaattctcataggaat

SEQ ID NO: 1806 - DNA, 27 bp, Homo sapiens
  source 1..27: mol_type = other DNA
caagtataaaaaattctcataggaatt

SEQ ID NO: 1807 - DNA, 27 bp, Homo sapiens
  source 1..27: mol_type = other DNA
aagtataaaaaattctcataggaatta

SEQ ID NO: 1808 - DNA, 27 bp, Homo sapiens
  source 1..27: mol_type = other DNA
agtataaaaaattctcataggaattaa

SEQ ID NO: 1809 - DNA, 27 bp, Homo sapiens
  source 1..27: mol_type = other DNA
gtataaaaaattctcataggaattaaa

SEQ ID NO: 1810 - DNA, 27 bp, Homo sapiens
  source 1..27: mol_type = other DNA
tataaaaaattctcataggaattaaat

SEQ ID NO: 1811 - DNA, 27 bp, Homo sapiens
  source 1..27: mol_type = other DNA
ataaaaaattctcataggaattaaatg

SEQ ID NO: 1812 - DNA, 27 bp, Homo sapiens
  source 1..27: mol_type = other DNA
taaaaaattctcataggaattaaatgt

SEQ ID NO: 1813 - DNA, 27 bp, Homo sapiens
  source 1..27: mol_type = other DNA
aaaaattctcataggaattaaatgtag

SEQ ID NO: 1814 - DNA, 27 bp, Homo sapiens
  source 1..27: mol_type = other DNA
aaaattctcataggaattaaatgtagt

SEQ ID NO: 1815 - DNA, 27 bp, Homo sapiens
  source 1..27: mol_type = other DNA
ctctttcatagtataactttaaatctt

SEQ ID NO: 1816 - DNA, 27 bp, Homo sapiens
  source 1..27: mol_type = other DNA
tcatagtataactttaaatcttttctt

SEQ ID NO: 1817 - DNA, 27 bp, Homo sapiens
  source 1..27: mol_type = other DNA
catagtataactttaaatcttttcttc

SEQ ID NO: 1818 - DNA, 27 bp, Homo sapiens
  source 1..27: mol_type = other DNA
tttaaatcttttcttcaacttgagtct

SEQ ID NO: 1819 - DNA, 27 bp, Homo sapiens
  source 1..27: mol_type = other DNA
ttaaatcttttcttcaacttgagtctt

SEQ ID NO: 1820 - DNA, 27 bp, Homo sapiens
  source 1..27: mol_type = other DNA
aacttgagtctttgaagatagttttaa

SEQ ID NO: 1821 - DNA, 27 bp, Homo sapiens
  source 1..27: mol_type = other DNA
cttgagtctttgaagatagttttaatt

SEQ ID NO: 1822 - DNA, 27 bp, Homo sapiens
  source 1..27: mol_type = other DNA
ttgagtctttgaagatagttttaattc

SEQ ID NO: 1823 - DNA, 27 bp, Homo sapiens
  source 1..27: mol_type = other DNA
aagatagttttaattctgcttgtgaca

SEQ ID NO: 1824 - DNA, 27 bp, Homo sapiens
  source 1..27: mol_type = other DNA
agatagttttaattctgcttgtgacat

SEQ ID NO: 1825 - DNA, 27 bp, Homo sapiens
  source 1..27: mol_type = other DNA
gatagttttaattctgcttgtgacatt

SEQ ID NO: 1826 - DNA, 27 bp, Homo sapiens
  source 1..27: mol_type = other DNA
tgcttgtgacattaaaagattatttgg

SEQ ID NO: 1827 - DNA, 27 bp, Homo sapiens
  source 1..27: mol_type = other DNA
agcattgcttttgtttcttaagaaaac

SEQ ID NO: 1828 - DNA, 27 bp, Homo sapiens
  source 1..27: mol_type = other DNA
gcattgcttttgtttcttaagaaaaca

SEQ ID NO: 1829 - DNA, 27 bp, Homo sapiens
  source 1..27: mol_type = other DNA
cttttgtttcttaagaaaacaaactct

SEQ ID NO: 1830 - DNA, 27 bp, Homo sapiens
  source 1..27: mol_type = other DNA
ttcttaagaaaacaaactcttttttaa

SEQ ID NO: 1831 - DNA, 27 bp, Homo sapiens
  source 1..27: mol_type = other DNA
tcttaagaaaacaaactcttttttaaa

SEQ ID NO: 1832 - DNA, 27 bp, Homo sapiens
  source 1..27: mol_type = other DNA
cttaagaaaacaaactcttttttaaaa

SEQ ID NO: 1833 - DNA, 27 bp, Homo sapiens
  source 1..27: mol_type = other DNA
ttaagaaaacaaactcttttttaaaaa

SEQ ID NO: 1834 - DNA, 27 bp, Homo sapiens
  source 1..27: mol_type = other DNA
taagaaaacaaactcttttttaaaaat

SEQ ID NO: 1835 - DNA, 27 bp, Homo sapiens
  source 1..27: mol_type = other DNA
aagaaaacaaactcttttttaaaaatt

SEQ ID NO: 1836 - DNA, 27 bp, Homo sapiens
  source 1..27: mol_type = other DNA
agaaaacaaactcttttttaaaaatta

SEQ ID NO: 1837 - DNA, 27 bp, Homo sapiens
  source 1..27: mol_type = other DNA
aacaaactcttttttaaaaattacttt

SEQ ID NO: 1838 - DNA, 27 bp, Homo sapiens
  source 1..27: mol_type = other DNA
ctcttttttaaaaattacttttaaata

SEQ ID NO: 1839 - DNA, 27 bp, Homo sapiens
  source 1..27: mol_type = other DNA
tcttttttaaaaattacttttaaatat

SEQ ID NO: 1840 - DNA, 27 bp, Homo sapiens
  source 1..27: mol_type = other DNA
cttttttaaaaattacttttaaatatt

SEQ ID NO: 1841 - DNA, 27 bp, Homo sapiens
  source 1..27: mol_type = other DNA
ttttttaaaaattacttttaaatatta

SEQ ID NO: 1842 - DNA, 27 bp, Homo sapiens
  source 1..27: mol_type = other DNA
tttttaaaaattacttttaaatattaa

SEQ ID NO: 1843 - DNA, 27 bp, Homo sapiens
  source 1..27: mol_type = other DNA
ttttaaaaattacttttaaatattaac

SEQ ID NO: 1844 - DNA, 27 bp, Homo sapiens
  source 1..27: mol_type = other DNA
tttaaaaattacttttaaatattaact

SEQ ID NO: 1845 - DNA, 27 bp, Homo sapiens
  source 1..27: mol_type = other DNA
ttaaaaattacttttaaatattaactc

SEQ ID NO: 1846 - DNA, 27 bp, Homo sapiens
  source 1..27: mol_type = other DNA
taaaaattacttttaaatattaactca

SEQ ID NO: 1847 - DNA, 27 bp, Homo sapiens
  source 1..27: mol_type = other DNA
tacttttaaatattaactcaaaagttg

SEQ ID NO: 1848 - DNA, 27 bp, Homo sapiens
  source 1..27: mol_type = other DNA
acttttaaatattaactcaaaagttga

SEQ ID NO: 1849 - DNA, 27 bp, Homo sapiens
  source 1..27: mol_type = other DNA
ttttaaatattaactcaaaagttgaga

SEQ ID NO: 1850 - DNA, 27 bp, Homo sapiens
  source 1..27: mol_type = other DNA
ttaaatattaactcaaaagttgagatt

SEQ ID NO: 1851 - DNA, 27 bp, Homo sapiens
  source 1..27: mol_type = other DNA
taaatattaactcaaaagttgagattt

SEQ ID NO: 1852 - DNA, 27 bp, Homo sapiens
  source 1..27: mol_type = other DNA
aaatattaactcaaaagttgagatttt

SEQ ID NO: 1853 - DNA, 27 bp, Homo sapiens
  source 1..27: mol_type = other DNA
aatattaactcaaaagttgagattttg

SEQ ID NO: 1854 - DNA, 27 bp, Homo sapiens
  source 1..27: mol_type = other DNA
ggtgtgccaagacattaattttttttt

SEQ ID NO: 1855 - DNA, 27 bp, Homo sapiens
  source 1..27: mol_type = other DNA
gccaagacattaattttttttttaaac

SEQ ID NO: 1856 - DNA, 27 bp, Homo sapiens
  source 1..27: mol_type = other DNA
ccaagacattaattttttttttaaaca

SEQ ID NO: 1857 - DNA, 27 bp, Homo sapiens
  source 1..27: mol_type = other DNA
cattaattttttttttaaacaatgaag

SEQ ID NO: 1858 - DNA, 27 bp, Homo sapiens
  source 1..27: mol_type = other DNA
attaattttttttttaaacaatgaagt

SEQ ID NO: 1859 - DNA, 27 bp, Homo sapiens
  source 1..27: mol_type = other DNA
taattttttttttaaacaatgaagtga

SEQ ID NO: 1860 - DNA, 27 bp, Homo sapiens
  source 1..27: mol_type = other DNA
attttttttttaaacaatgaagtgaaa

SEQ ID NO: 1861 - DNA, 27 bp, Homo sapiens
  source 1..27: mol_type = other DNA
ttttttttttaaacaatgaagtgaaaa

SEQ ID NO: 1862 - DNA, 27 bp, Homo sapiens
  source 1..27: mol_type = other DNA
tttttttttaaacaatgaagtgaaaaa

SEQ ID NO: 1863 - DNA, 27 bp, Homo sapiens
  source 1..27: mol_type = other DNA
ttttttttaaacaatgaagtgaaaaag

SEQ ID NO: 1864 - DNA, 27 bp, Homo sapiens
  source 1..27: mol_type = other DNA
tttttttaaacaatgaagtgaaaaagt

SEQ ID NO: 1865 - DNA, 27 bp, Homo sapiens
  source 1..27: mol_type = other DNA
tttttaaacaatgaagtgaaaaagttt

SEQ ID NO: 1866 - DNA, 27 bp, Homo sapiens
  source 1..27: mol_type = other DNA
ttttaaacaatgaagtgaaaaagtttt

SEQ ID NO: 1867 - DNA, 27 bp, Homo sapiens
  source 1..27: mol_type = other DNA
tttaaacaatgaagtgaaaaagtttta

SEQ ID NO: 1868 - DNA, 27 bp, Homo sapiens
  source 1..27: mol_type = other DNA
atgaagtgaaaaagttttacaatctct

SEQ ID NO: 1869 - DNA, 27 bp, Homo sapiens
  source 1..27: mol_type = other DNA
tgaaaaagttttacaatctctaggttt

SEQ ID NO: 1870 - DNA, 27 bp, Homo sapiens
  source 1..27: mol_type = other DNA
gaaaaagttttacaatctctaggtttg

SEQ ID NO: 1871 - DNA, 27 bp, Homo sapiens
  source 1..27: mol_type = other DNA
aaaaagttttacaatctctaggtttgg

SEQ ID NO: 1872 - DNA, 27 bp, Homo sapiens
  source 1..27: mol_type = other DNA
actggttaaattaacattgcataaaca

SEQ ID NO: 1873 - DNA, 27 bp, Homo sapiens
  source 1..27: mol_type = other DNA
ctggttaaattaacattgcataaacac

SEQ ID NO: 1874 - DNA, 27 bp, Homo sapiens
  source 1..27: mol_type = other DNA
tggttaaattaacattgcataaacact

SEQ ID NO: 1875 - DNA, 27 bp, Homo sapiens
  source 1..27: mol_type = other DNA
acattgcataaacacttttcaagtctg

SEQ ID NO: 1876 - DNA, 27 bp, Homo sapiens
  source 1..27: mol_type = other DNA
tcaagtctgatccatatttaataatgc

SEQ ID NO: 1877 - DNA, 27 bp, Homo sapiens
  source 1..27: mol_type = other DNA
tccatatttaataatgctttaaaataa

SEQ ID NO: 1878 - DNA, 27 bp, Homo sapiens
  source 1..27: mol_type = other DNA
ccatatttaataatgctttaaaataaa

SEQ ID NO: 1879 - DNA, 27 bp, Homo sapiens
  source 1..27: mol_type = other DNA
catatttaataatgctttaaaataaaa

SEQ ID NO: 1880 - DNA, 27 bp, Homo sapiens
  source 1..27: mol_type = other DNA
atatttaataatgctttaaaataaaaa

SEQ ID NO: 1881 - DNA, 27 bp, Homo sapiens
  source 1..27: mol_type = other DNA
tatttaataatgctttaaaataaaaat

SEQ ID NO: 1882 - DNA, 27 bp, Homo sapiens
  source 1..27: mol_type = other DNA
atttaataatgctttaaaataaaaata

SEQ ID NO: 1883 - DNA, 27 bp, Homo sapiens
  source 1..27: mol_type = other DNA
ttaataatgctttaaaataaaaataaa

SEQ ID NO: 1884 - DNA, 27 bp, Homo sapiens
  source 1..27: mol_type = other DNA
taataatgctttaaaataaaaataaaa

SEQ ID NO: 1885 - DNA, 27 bp, Homo sapiens
  source 1..27: mol_type = other DNA
aataatgctttaaaataaaaataaaaa

SEQ ID NO: 1886 - DNA, 27 bp, Homo sapiens
  source 1..27: mol_type = other DNA
ataatgctttaaaataaaaataaaaac

SEQ ID NO: 1887 - DNA, 27 bp, Homo sapiens
  source 1..27: mol_type = other DNA
tttaaaataaaaataaaaacaatcctt

SEQ ID NO: 1888 - DNA, 27 bp, Homo sapiens
  source 1..27: mol_type = other DNA
ataaaaataaaaacaatccttttgata

SEQ ID NO: 1889 - DNA, 27 bp, Homo sapiens
  source 1..27: mol_type = other DNA
taaaaataaaaacaatccttttgataa

SEQ ID NO: 1890 - DNA, 27 bp, Homo sapiens
  source 1..27: mol_type = other DNA
aaaaataaaaacaatccttttgataaa

SEQ ID NO: 1891 - DNA, 27 bp, Homo sapiens
  source 1..27: mol_type = other DNA
aaaataaaaacaatccttttgataaat

SEQ ID NO: 1892 - DNA, 27 bp, Homo sapiens
  source 1..27: mol_type = other DNA
aaataaaaacaatccttttgataaatt

SEQ ID NO: 1893 - DNA, 27 bp, Homo sapiens
  source 1..27: mol_type = other DNA
aataaaaacaatccttttgataaattt

SEQ ID NO: 1894 - DNA, 27 bp, Homo sapiens
  source 1..27: mol_type = other DNA
ataaaaacaatccttttgataaattta

SEQ ID NO: 1895 - DNA, 27 bp, Homo sapiens
  source 1..27: mol_type = other DNA
taaaaacaatccttttgataaatttaa

SEQ ID NO: 1896 - DNA, 27 bp, Homo sapiens
  source 1..27: mol_type = other DNA
aacaatccttttgataaatttaaaatg

SEQ ID NO: 1897 - DNA, 27 bp, Homo sapiens
  source 1..27: mol_type = other DNA
tccttttgataaatttaaaatgttact

SEQ ID NO: 1898 - DNA, 27 bp, Homo sapiens
  source 1..27: mol_type = other DNA
ccttttgataaatttaaaatgttactt

SEQ ID NO: 1899 - DNA, 27 bp, Homo sapiens
  source 1..27: mol_type = other DNA
cttttgataaatttaaaatgttactta

SEQ ID NO: 1900 - DNA, 27 bp, Homo sapiens
  source 1..27: mol_type = other DNA
tgataaatttaaaatgttacttatttt

SEQ ID NO: 1901 - DNA, 27 bp, Homo sapiens
  source 1..27: mol_type = other DNA
gataaatttaaaatgttacttatttta

SEQ ID NO: 1902 - DNA, 27 bp, Homo sapiens
  source 1..27: mol_type = other DNA
ataaatttaaaatgttacttattttaa

SEQ ID NO: 1903 - DNA, 27 bp, Homo sapiens
  source 1..27: mol_type = other DNA
taaatttaaaatgttacttattttaaa

SEQ ID NO: 1904 - DNA, 27 bp, Homo sapiens
  source 1..27: mol_type = other DNA
aaatttaaaatgttacttattttaaaa

SEQ ID NO: 1905 - DNA, 27 bp, Homo sapiens
  source 1..27: mol_type = other DNA
aatttaaaatgttacttattttaaaat

SEQ ID NO: 1906 - DNA, 27 bp, Homo sapiens
  source 1..27: mol_type = other DNA
tttaaaatgttacttattttaaaataa

SEQ ID NO: 1907 - DNA, 27 bp, Homo sapiens
  source 1..27: mol_type = other DNA
ttaaaatgttacttattttaaaataaa

SEQ ID NO: 1908 - DNA, 27 bp, Homo sapiens
  source 1..27: mol_type = other DNA
taaaatgttacttattttaaaataaat

SEQ ID NO: 1909 - DNA, 27 bp, Homo sapiens
  source 1..27: mol_type = other DNA
aaaatgttacttattttaaaataaatg

SEQ ID NO: 1910 - DNA, 27 bp, Homo sapiens
  source 1..27: mol_type = other DNA
aaatgttacttattttaaaataaatga

SEQ ID NO: 1911 - DNA, 27 bp, Homo sapiens
  source 1..27: mol_type = other DNA
atgttacttattttaaaataaatgaag

SEQ ID NO: 1912 - DNA, 27 bp, Homo sapiens
  source 1..27: mol_type = other DNA
acttattttaaaataaatgaagtgaga

SEQ ID NO: 1913 - DNA, 27 bp, Homo sapiens
  source 1..27: mol_type = other DNA
ttattttaaaataaatgaagtgagatg

SEQ ID NO: 1914 - DNA, 27 bp, Homo sapiens
  source 1..27: mol_type = other DNA
tattttaaaataaatgaagtgagatgg

SEQ ID NO: 1915 - DNA, 27 bp, Homo sapiens
  source 1..27: mol_type = other DNA
tttaaaataaatgaagtgagatggcat

SEQ ID NO: 1916 - DNA, 27 bp, Homo sapiens
  source 1..27: mol_type = other DNA
ttaaaataaatgaagtgagatggcatg

SEQ ID NO: 1917 - DNA, 27 bp, Homo sapiens
  source 1..27: mol_type = other DNA
tccatttcttcatgttaaaagaagtca

SEQ ID NO: 1918 - DNA, 27 bp, Homo sapiens
  source 1..27: mol_type = other DNA
ccatttcttcatgttaaaagaagtcat

SEQ ID NO: 1919 - DNA, 27 bp, Homo sapiens
  source 1..27: mol_type = other DNA
ctcaaactcttagttttttttttttac

SEQ ID NO: 1920 - DNA, 27 bp, Homo sapiens
  source 1..27: mol_type = other DNA
tagttttttttttttacaactatgtaa

SEQ ID NO: 1921 - DNA, 27 bp, Homo sapiens
  source 1..27: mol_type = other DNA
agttttttttttttacaactatgtaat

SEQ ID NO: 1922 - DNA, 27 bp, Homo sapiens
  source 1..27: mol_type = other DNA
gttttttttttttacaactatgtaatt

SEQ ID NO: 1923 - DNA, 27 bp, Homo sapiens
  source 1..27: mol_type = other DNA
ttttttttttttacaactatgtaattt

SEQ ID NO: 1924 - DNA, 27 bp, Homo sapiens
  source 1..27: mol_type = other DNA
tttttttttttacaactatgtaattta

SEQ ID NO: 1925 - DNA, 27 bp, Homo sapiens
  source 1..27: mol_type = other DNA
ttttttttttacaactatgtaatttat

SEQ ID NO: 1926 - DNA, 27 bp, Homo sapiens
  source 1..27: mol_type = other DNA
tttttttttacaactatgtaatttata

SEQ ID NO: 1927 - DNA, 27 bp, Homo sapiens
  source 1..27: mol_type = other DNA
ttttttttacaactatgtaatttatat

SEQ ID NO: 1928 - DNA, 27 bp, Homo sapiens
  source 1..27: mol_type = other DNA
tttttttacaactatgtaatttatatt

SEQ ID NO: 1929 - DNA, 27 bp, Homo sapiens
  source 1..27: mol_type = other DNA
ttttttacaactatgtaatttatattc

SEQ ID NO: 1930 - DNA, 27 bp, Homo sapiens
  source 1..27: mol_type = other DNA
tttttacaactatgtaatttatattcc

SEQ ID NO: 1931 - DNA, 27 bp, Homo sapiens
  source 1..27: mol_type = other DNA
aactatgtaatttatattccatttaca

SEQ ID NO: 1932 - DNA, 27 bp, Homo sapiens
  source 1..27: mol_type = other DNA
actatgtaatttatattccatttacat

SEQ ID NO: 1933 - DNA, 27 bp, Homo sapiens
  source 1..27: mol_type = other DNA
ctatgtaatttatattccatttacata

SEQ ID NO: 1934 - DNA, 27 bp, Homo sapiens
  source 1..27: mol_type = other DNA
aatttatattccatttacataaggata

SEQ ID NO: 1935 - DNA, 27 bp, Homo sapiens
  source 1..27: mol_type = other DNA
atttatattccatttacataaggatac

SEQ ID NO: 1936 - DNA, 27 bp, Homo sapiens
  source 1..27: mol_type = other DNA
tttatattccatttacataaggataca

SEQ ID NO: 1937 - DNA, 27 bp, Homo sapiens
  source 1..27: mol_type = other DNA
ttatattccatttacataaggatacac

SEQ ID NO: 1938 - DNA, 27 bp, Homo sapiens
  source 1..27: mol_type = other DNA
tacataaggatacacttatttgtcaag

SEQ ID NO: 1939 - DNA, 27 bp, Homo sapiens
  source 1..27: mol_type = other DNA
taaggatacacttatttgtcaagctca

SEQ ID NO: 1940 - DNA, 27 bp, Homo sapiens
  source 1..27: mol_type = other DNA
atctgtaaatttttaacctatgttaca

SEQ ID NO: 1941 - DNA, 27 bp, Homo sapiens
  source 1..27: mol_type = other DNA
tctgtaaatttttaacctatgttacac

SEQ ID NO: 1942 - DNA, 27 bp, Homo sapiens
  source 1..27: mol_type = other DNA
ctgtaaatttttaacctatgttacacc

SEQ ID NO: 1943 - DNA, 27 bp, Homo sapiens
  source 1..27: mol_type = other DNA
tgcaagaggtgaagtttatatttgaat

SEQ ID NO: 1944 - DNA, 27 bp, Homo sapiens
  source 1..27: mol_type = other DNA
caagaggtgaagtttatatttgaatat

SEQ ID NO: 1945 - DNA, 27 bp, Homo sapiens
  source 1..27: mol_type = other DNA
aagaggtgaagtttatatttgaatatc

SEQ ID NO: 1946 - DNA, 27 bp, Homo sapiens
  source 1..27: mol_type = other DNA
gaggtgaagtttatatttgaatatcca

SEQ ID NO: 1947 - DNA, 27 bp, Homo sapiens
  source 1..27: mol_type = other DNA
aggtgaagtttatatttgaatatccat

SEQ ID NO: 1948 - DNA, 27 bp, Homo sapiens
  source 1..27: mol_type = other DNA
aagtttatatttgaatatccattctcg

SEQ ID NO: 1949 - DNA, 27 bp, Homo sapiens
  source 1..27: mol_type = other DNA
acttgatgcagttttaatacttgtaat

SEQ ID NO: 1950 - DNA, 27 bp, Homo sapiens
  source 1..27: mol_type = other DNA
ttgatgcagttttaatacttgtaattc

SEQ ID NO: 1951 - DNA, 27 bp, Homo sapiens
  source 1..27: mol_type = other DNA
gatttgacctaatcactaattttcagg

SEQ ID NO: 1952 - DNA, 27 bp, Homo sapiens
  source 1..27: mol_type = other DNA
acctaatcactaattttcaggtggtgg

SEQ ID NO: 1953 - DNA, 27 bp, Homo sapiens
  source 1..27: mol_type = other DNA
cagtaggatttttcaaacctggtatga

SEQ ID NO: 1954 - DNA, 27 bp, Homo sapiens
  source 1..27: mol_type = other DNA
agtggaaggagaatttaataaagatag

SEQ ID NO: 1955 - DNA, 27 bp, Homo sapiens
  source 1..27: mol_type = other DNA
ggaaggagaatttaataaagatagtgc

SEQ ID NO: 1956 - DNA, 27 bp, Homo sapiens
  source 1..27: mol_type = other DNA
aaggagaatttaataaagatagtgctg

SEQ ID NO: 1957 - DNA, 27 bp, Homo sapiens
  source 1..27: mol_type = other DNA
aggagaatttaataaagatagtgctga

SEQ ID NO: 1958 - DNA, 27 bp, Homo sapiens
  source 1..27: mol_type = other DNA
gaatttaataaagatagtgctgaaaga

SEQ ID NO: 1959 - DNA, 27 bp, Homo sapiens
  source 1..27: mol_type = other DNA
tccttaggtaatctataactaggacta

SEQ ID NO: 1960 - DNA, 27 bp, Homo sapiens
  source 1..27: mol_type = other DNA
ccttaggtaatctataactaggactac

SEQ ID NO: 1961 - DNA, 27 bp, Homo sapiens
  source 1..27: mol_type = other DNA
aacagtaatacattccattgttttagt

SEQ ID NO: 1962 - DNA, 27 bp, Homo sapiens
  source 1..27: mol_type = other DNA
cagtaatacattccattgttttagtaa

SEQ ID NO: 1963 - DNA, 27 bp, Homo sapiens
  source 1..27: mol_type = other DNA
agtaatacattccattgttttagtaac

SEQ ID NO: 1964 - DNA, 27 bp, Homo sapiens
  source 1..27: mol_type = other DNA
gtaatacattccattgttttagtaacc

SEQ ID NO: 1965 - DNA, 27 bp, Homo sapiens
  source 1..27: mol_type = other DNA
ccattgttttagtaaccagaaatcttc

SEQ ID NO: 1966 - DNA, 27 bp, Homo sapiens
  source 1..27: mol_type = other DNA
accagaaatcttcatgcaatgaaaaat

SEQ ID NO: 1967 - DNA, 27 bp, Homo sapiens
  source 1..27: mol_type = other DNA
ttcatgcaatgaaaaatactttaattc

SEQ ID NO: 1968 - DNA, 27 bp, Homo sapiens
  source 1..27: mol_type = other DNA
aatgaaaaatactttaattcatgaagc

SEQ ID NO: 1969 - DNA, 27 bp, Homo sapiens
  source 1..27: mol_type = other DNA
tgaaaaatactttaattcatgaagctt

SEQ ID NO: 1970 - DNA, 27 bp, Homo sapiens
  source 1..27: mol_type = other DNA
gaaaaatactttaattcatgaagctta

SEQ ID NO: 1971 - DNA, 27 bp, Homo sapiens
  source 1..27: mol_type = other DNA
ttcatgaagcttactttttttttttgg

SEQ ID NO: 1972 - DNA, 27 bp, Homo sapiens
  source 1..27: mol_type = other DNA
atgaagcttactttttttttttggtgt

SEQ ID NO: 1973 - DNA, 27 bp, Homo sapiens
  source 1..27: mol_type = other DNA
agcttactttttttttttggtgtcaga

SEQ ID NO: 1974 - DNA, 27 bp, Homo sapiens
  source 1..27: mol_type = other DNA
tactttttttttttggtgtcagagtct

SEQ ID NO: 1975 - DNA, 27 bp, Homo sapiens
  source 1..27: mol_type = other DNA
actttttttttttggtgtcagagtctc

SEQ ID NO: 1976 - DNA, 27 bp, Homo sapiens
  source 1..27: mol_type = other DNA
aactaatttttgtatttttaggagaga

SEQ ID NO: 1977 - DNA, 27 bp, Homo sapiens
  source 1..27: mol_type = other DNA
taatttttgtatttttaggagagacgg

SEQ ID NO: 1978 - DNA, 27 bp, Homo sapiens
  source 1..27: mol_type = other DNA
ctcatttattcagcaaatatttattga

SEQ ID NO: 1979 - DNA, 27 bp, Homo sapiens
  source 1..27: mol_type = other DNA
catttattcagcaaatatttattgagt

SEQ ID NO: 1980 - DNA, 27 bp, Homo sapiens
  source 1..27: mol_type = other DNA
tttattcagcaaatatttattgagtgc

SEQ ID NO: 1981 - DNA, 27 bp, Homo sapiens
  source 1..27: mol_type = other DNA
tattttagttttgcaaagaaggggttt

SEQ ID NO: 1982 - DNA, 27 bp, Homo sapiens
  source 1..27: mol_type = other DNA
ctctataattgttttgctacgattcca

SEQ ID NO: 1983 - DNA, 27 bp, Homo sapiens
  source 1..27: mol_type = other DNA
tactttatgtaaatcacttcattgttt

SEQ ID NO: 1984 - DNA, 27 bp, Homo sapiens
  source 1..27: mol_type = other DNA
actttatgtaaatcacttcattgtttt

SEQ ID NO: 1985 - DNA, 27 bp, Homo sapiens
  source 1..27: mol_type = other DNA
ctttatgtaaatcacttcattgtttta

SEQ ID NO: 1986 - DNA, 27 bp, Homo sapiens
  source 1..27: mol_type = other DNA
tttatgtaaatcacttcattgttttaa

SEQ ID NO: 1987 - DNA, 27 bp, Homo sapiens
  source 1..27: mol_type = other DNA
ttatgtaaatcacttcattgttttaaa

SEQ ID NO: 1988 - DNA, 27 bp, Homo sapiens
  source 1..27: mol_type = other DNA
tatgtaaatcacttcattgttttaaag

SEQ ID NO: 1989 - DNA, 27 bp, Homo sapiens
  source 1..27: mol_type = other DNA
atgtaaatcacttcattgttttaaagg

SEQ ID NO: 1990 - DNA, 27 bp, Homo sapiens
  source 1..27: mol_type = other DNA
attgttttaaaggaataaacttgatta

SEQ ID NO: 1991 - DNA, 27 bp, Homo sapiens
  source 1..27: mol_type = other DNA
ttgttttaaaggaataaacttgattat

SEQ ID NO: 1992 - DNA, 27 bp, Homo sapiens
  source 1..27: mol_type = other DNA
ttttaaaggaataaacttgattatatt

SEQ ID NO: 1993 - DNA, 27 bp, Homo sapiens
  source 1..27: mol_type = other DNA
tttaaaggaataaacttgattatattg

SEQ ID NO: 1994 - DNA, 27 bp, Homo sapiens
  source 1..27: mol_type = other DNA
ttaaaggaataaacttgattatattgt

SEQ ID NO: 1995 - DNA, 27 bp, Homo sapiens
  source 1..27: mol_type = other DNA
aaaggaataaacttgattatattgttt

SEQ ID NO: 1996 - DNA, 27 bp, Homo sapiens
  source 1..27: mol_type = other DNA
aaggaataaacttgattatattgtttt

SEQ ID NO: 1997 - DNA, 27 bp, Homo sapiens
  source 1..27: mol_type = other DNA
aggaataaacttgattatattgttttt

SEQ ID NO: 1998 - DNA, 27 bp, Homo sapiens
  source 1..27: mol_type = other DNA
ggaataaacttgattatattgtttttt

SEQ ID NO: 1999 - DNA, 27 bp, Homo sapiens
  source 1..27: mol_type = other DNA
gaataaacttgattatattgttttttt

SEQ ID NO: 2000 - DNA, 27 bp, Homo sapiens
  source 1..27: mol_type = other DNA
aacttgattatattgtttttttatttg

SEQ ID NO: 2001 - DNA, 27 bp, Homo sapiens
  source 1..27: mol_type = other DNA
acttgattatattgtttttttatttgg

SEQ ID NO: 2002 - DNA, 27 bp, Homo sapiens
  source 1..27: mol_type = other DNA
tgattatattgtttttttatttggcat

SEQ ID NO: 2003 - DNA, 27 bp, Homo sapiens
  source 1..27: mol_type = other DNA
atattgtttttttatttggcataactg

SEQ ID NO: 2004 - DNA, 27 bp, Homo sapiens
  source 1..27: mol_type = other DNA
tattgtttttttatttggcataactgt

SEQ ID NO: 2005 - DNA, 27 bp, Homo sapiens
  source 1..27: mol_type = other DNA
gtttttttatttggcataactgtgatt

SEQ ID NO: 2006 - DNA, 27 bp, Homo sapiens
  source 1..27: mol_type = other DNA
tttttttatttggcataactgtgattc

SEQ ID NO: 2007 - DNA, 27 bp, Homo sapiens
  source 1..27: mol_type = other DNA
gcataactgtgattcttttaggacaat

SEQ ID NO: 2008 - DNA, 27 bp, Homo sapiens
  source 1..27: mol_type = other DNA
actgtgattcttttaggacaattactg

SEQ ID NO: 2009 - DNA, 27 bp, Homo sapiens
  source 1..27: mol_type = other DNA
ctgtgattcttttaggacaattactgt

SEQ ID NO: 2010 - DNA, 27 bp, Homo sapiens
  source 1..27: mol_type = other DNA
ggtgtatgtcagatattcatattgacc

SEQ ID NO: 2011 - DNA, 27 bp, Homo sapiens
  source 1..27: mol_type = other DNA
gtgtatgtcagatattcatattgaccc

SEQ ID NO: 2012 - DNA, 27 bp, Homo sapiens
  source 1..27: mol_type = other DNA
caaatgtgtaatattccagttttctct

SEQ ID NO: 2013 - DNA, 27 bp, Homo sapiens
  source 1..27: mol_type = other DNA
cataagtaattaaaatatacttaaaaa

SEQ ID NO: 2014 - DNA, 27 bp, Homo sapiens
  source 1..27: mol_type = other DNA
ataagtaattaaaatatacttaaaaat

SEQ ID NO: 2015 - DNA, 27 bp, Homo sapiens
  source 1..27: mol_type = other DNA
taagtaattaaaatatacttaaaaatt

SEQ ID NO: 2016 - DNA, 27 bp, Homo sapiens
  source 1..27: mol_type = other DNA
aagtaattaaaatatacttaaaaatta

SEQ ID NO: 2017 - DNA, 27 bp, Homo sapiens
  source 1..27: mol_type = other DNA
agtaattaaaatatacttaaaaattaa

SEQ ID NO: 2018 - DNA, 27 bp, Homo sapiens
  source 1..27: mol_type = other DNA
gtaattaaaatatacttaaaaattaat

SEQ ID NO: 2019 - DNA, 27 bp, Homo sapiens
  source 1..27: mol_type = other DNA
taattaaaatatacttaaaaattaata

SEQ ID NO: 2020 - DNA, 27 bp, Homo sapiens
  source 1..27: mol_type = other DNA
aattaaaatatacttaaaaattaatag

SEQ ID NO: 2021 - DNA, 27 bp, Homo sapiens
  source 1..27: mol_type = other DNA
attaaaatatacttaaaaattaatagt

SEQ ID NO: 2022 - DNA, 27 bp, Homo sapiens
  source 1..27: mol_type = other DNA
taaaatatacttaaaaattaatagttt

SEQ ID NO: 2023 - DNA, 27 bp, Homo sapiens
  source 1..27: mol_type = other DNA
aaaatatacttaaaaattaatagtttt

SEQ ID NO: 2024 - DNA, 27 bp, Homo sapiens
  source 1..27: mol_type = other DNA
aaatatacttaaaaattaatagtttta

SEQ ID NO: 2025 - DNA, 27 bp, Homo sapiens
  source 1..27: mol_type = other DNA
aatatacttaaaaattaatagttttat

SEQ ID NO: 2026 - DNA, 27 bp, Homo sapiens
  source 1..27: mol_type = other DNA
tacttaaaaattaatagttttatctgg

SEQ ID NO: 2027 - DNA, 27 bp, Homo sapiens
  source 1..27: mol_type = other DNA
taaaaattaatagttttatctgggtac

SEQ ID NO: 2028 - DNA, 27 bp, Homo sapiens
  source 1..27: mol_type = other DNA
aaaaattaatagttttatctgggtaca

SEQ ID NO: 2029 - DNA, 27 bp, Homo sapiens
  source 1..27: mol_type = other DNA
aaaattaatagttttatctgggtacaa

SEQ ID NO: 2030 - DNA, 27 bp, Homo sapiens
  source 1..27: mol_type = other DNA
atctgggtacaaataaacaggtgcctg

SEQ ID NO: 2031 - DNA, 27 bp, Homo sapiens
  source 1..27: mol_type = other DNA
gacaaggaaacttctatgtaaaaatca

SEQ ID NO: 2032 - DNA, 27 bp, Homo sapiens
  source 1..27: mol_type = other DNA
acaaggaaacttctatgtaaaaatcac

SEQ ID NO: 2033 - DNA, 27 bp, Homo sapiens
  source 1..27: mol_type = other DNA
caaggaaacttctatgtaaaaatcact

SEQ ID NO: 2034 - DNA, 27 bp, Homo sapiens
  source 1..27: mol_type = other DNA
ttctatgtaaaaatcactatgatttct

SEQ ID NO: 2035 - DNA, 27 bp, Homo sapiens
  source 1..27: mol_type = other DNA
tctatgtaaaaatcactatgatttctg

SEQ ID NO: 2036 - DNA, 27 bp, Homo sapiens
  source 1..27: mol_type = other DNA
ctatgtaaaaatcactatgatttctga

SEQ ID NO: 2037 - DNA, 27 bp, Homo sapiens
  source 1..27: mol_type = other DNA
gtaaaaatcactatgatttctgaattg

SEQ ID NO: 2038 - DNA, 27 bp, Homo sapiens
  source 1..27: mol_type = other DNA
taaaaatcactatgatttctgaattgc

SEQ ID NO: 2039 - DNA, 27 bp, Homo sapiens
  source 1..27: mol_type = other DNA
ctatgatttctgaattgctatgtgaaa

SEQ ID NO: 2040 - DNA, 27 bp, Homo sapiens
  source 1..27: mol_type = other DNA
tatgatttctgaattgctatgtgaaac

SEQ ID NO: 2041 - DNA, 27 bp, Homo sapiens
  source 1..27: mol_type = other DNA
tatgtgaaactacagatctttggaaca

SEQ ID NO: 2042 - DNA, 27 bp, Homo sapiens
  source 1..27: mol_type = other DNA
atgtgaaactacagatctttggaacac

SEQ ID NO: 2043 - DNA, 27 bp, Homo sapiens
  source 1..27: mol_type = other DNA
agggtgttaagacttacacagtacctc

SEQ ID NO: 2044 - DNA, 27 bp, Homo sapiens
  source 1..27: mol_type = other DNA
tttaggcctcttgaatttttgatgtag

SEQ ID NO: 2045 - DNA, 27 bp, Homo sapiens
  source 1..27: mol_type = other DNA
tcttgaatttttgatgtagatgggcat

SEQ ID NO: 2046 - DNA, 27 bp, Homo sapiens
  source 1..27: mol_type = other DNA
cttgaatttttgatgtagatgggcatt

SEQ ID NO: 2047 - DNA, 27 bp, Homo sapiens
  source 1..27: mol_type = other DNA
tagatgggcatttttttaaggtagtgg

SEQ ID NO: 2048 - DNA, 27 bp, Homo sapiens
  source 1..27: mol_type = other DNA
ggcatttttttaaggtagtggttaatt

SEQ ID NO: 2049 - DNA, 27 bp, Homo sapiens
  source 1..27: mol_type = other DNA
aggtagtggttaattacctttatgtga

SEQ ID NO: 2050 - DNA, 27 bp, Homo sapiens
  source 1..27: mol_type = other DNA
gtagtggttaattacctttatgtgaac

SEQ ID NO: 2051 - DNA, 27 bp, Homo sapiens
  source 1..27: mol_type = other DNA
tagtggttaattacctttatgtgaact

SEQ ID NO: 2052 - DNA, 27 bp, Homo sapiens
  source 1..27: mol_type = other DNA
agtggttaattacctttatgtgaactt

SEQ ID NO: 2053 - DNA, 27 bp, Homo sapiens
  source 1..27: mol_type = other DNA
gtggttaattacctttatgtgaacttt

SEQ ID NO: 2054 - DNA, 27 bp, Homo sapiens
  source 1..27: mol_type = other DNA
acctttatgtgaactttgaatggttta

SEQ ID NO: 2055 - DNA, 27 bp, Homo sapiens
  source 1..27: mol_type = other DNA
tatgtgaactttgaatggtttaacaaa

SEQ ID NO: 2056 - DNA, 27 bp, Homo sapiens
  source 1..27: mol_type = other DNA
aactttgaatggtttaacaaaagattt

SEQ ID NO: 2057 - DNA, 27 bp, Homo sapiens
  source 1..27: mol_type = other DNA
ttgaatggtttaacaaaagatttgttt

SEQ ID NO: 2058 - DNA, 27 bp, Homo sapiens
  source 1..27: mol_type = other DNA
tgaatggtttaacaaaagatttgtttt

SEQ ID NO: 2059 - DNA, 27 bp, Homo sapiens
  source 1..27: mol_type = other DNA
gaatggtttaacaaaagatttgttttt

SEQ ID NO: 2060 - DNA, 27 bp, Homo sapiens
  source 1..27: mol_type = other DNA
aatggtttaacaaaagatttgtttttg

SEQ ID NO: 2061 - DNA, 27 bp, Homo sapiens
  source 1..27: mol_type = other DNA
atggtttaacaaaagatttgtttttgt

SEQ ID NO: 2062 - DNA, 27 bp, Homo sapiens
  source 1..27: mol_type = other DNA
ggtttaacaaaagatttgtttttgtag

SEQ ID NO: 2063 - DNA, 27 bp, Homo sapiens
  source 1..27: mol_type = other DNA
gtttaacaaaagatttgtttttgtaga

SEQ ID NO: 2064 - DNA, 27 bp, Homo sapiens
  source 1..27: mol_type = other DNA
aacaaaagatttgtttttgtagagatt

SEQ ID NO: 2065 - DNA, 27 bp, Homo sapiens
  source 1..27: mol_type = other DNA
acaaaagatttgtttttgtagagattt

SEQ ID NO: 2066 - DNA, 27 bp, Homo sapiens
  source 1..27: mol_type = other DNA
caaaagatttgtttttgtagagatttt

SEQ ID NO: 2067 - DNA, 27 bp, Homo sapiens
  source 1..27: mol_type = other DNA
aaagatttgtttttgtagagattttaa

SEQ ID NO: 2068 - DNA, 27 bp, Homo sapiens
  source 1..27: mol_type = other DNA
aagatttgtttttgtagagattttaaa

SEQ ID NO: 2069 - DNA, 27 bp, Homo sapiens
  source 1..27: mol_type = other DNA
agatttgtttttgtagagattttaaag

SEQ ID NO: 2070 - DNA, 27 bp, Homo sapiens
  source 1..27: mol_type = other DNA
gatttgtttttgtagagattttaaagg

SEQ ID NO: 2071 - DNA, 27 bp, Homo sapiens
  source 1..27: mol_type = other DNA
tttttgtagagattttaaagggggaga

SEQ ID NO: 2072 - DNA, 27 bp, Homo sapiens
  source 1..27: mol_type = other DNA
aagggggagaattctagaaataaatgt

SEQ ID NO: 2073 - DNA, 27 bp, Homo sapiens
  source 1..27: mol_type = other DNA
gggggagaattctagaaataaatgtta

SEQ ID NO: 2074 - DNA, 27 bp, Homo sapiens
  source 1..27: mol_type = other DNA
ggggagaattctagaaataaatgttac

SEQ ID NO: 2075 - DNA, 27 bp, Homo sapiens
  source 1..27: mol_type = other DNA
gggagaattctagaaataaatgttacc

SEQ ID NO: 2076 - DNA, 27 bp, Homo sapiens
  source 1..27: mol_type = other DNA
ggagaattctagaaataaatgttacct

SEQ ID NO: 2077 - DNA, 27 bp, Homo sapiens
  source 1..27: mol_type = other DNA
gagaattctagaaataaatgttaccta

SEQ ID NO: 2078 - DNA, 27 bp, Homo sapiens
  source 1..27: mol_type = other DNA
ttctagaaataaatgttacctaattat

SEQ ID NO: 2079 - DNA, 27 bp, Homo sapiens
  source 1..27: mol_type = other DNA
tctagaaataaatgttacctaattatt

SEQ ID NO: 2080 - DNA, 27 bp, Homo sapiens
  source 1..27: mol_type = other DNA
ctagaaataaatgttacctaattatta

SEQ ID NO: 2081 - DNA, 27 bp, Homo sapiens
  source 1..27: mol_type = other DNA
tagaaataaatgttacctaattattac

SEQ ID NO: 2082 - DNA, 27 bp, Homo sapiens
  source 1..27: mol_type = other DNA
agaaataaatgttacctaattattaca

SEQ ID NO: 2083 - DNA, 27 bp, Homo sapiens
  source 1..27: mol_type = other DNA
aaataaatgttacctaattattacagc

SEQ ID NO: 2084 - DNA, 27 bp, Homo sapiens
  source 1..27: mol_type = other DNA
acctaattattacagccttaaagacaa

SEQ ID NO: 2085 - DNA, 27 bp, Homo sapiens
  source 1..27: mol_type = other DNA
cctaattattacagccttaaagacaaa

SEQ ID NO: 2086 - DNA, 27 bp, Homo sapiens
  source 1..27: mol_type = other DNA
ccttaaagacaaaaatccttgttgaag

SEQ ID NO: 2087 - DNA, 27 bp, Homo sapiens
  source 1..27: mol_type = other DNA
taaagacaaaaatccttgttgaagttt

SEQ ID NO: 2088 - DNA, 27 bp, Homo sapiens
  source 1..27: mol_type = other DNA
tccttgttgaagtttttttaaaaaaag

SEQ ID NO: 2089 - DNA, 27 bp, Homo sapiens
  source 1..27: mol_type = other DNA
ccttgttgaagtttttttaaaaaaagc

SEQ ID NO: 2090 - DNA, 27 bp, Homo sapiens
  source 1..27: mol_type = other DNA
ttgttgaagtttttttaaaaaaagcta

SEQ ID NO: 2091 - DNA, 27 bp, Homo sapiens
  source 1..27: mol_type = other DNA
tgttgaagtttttttaaaaaaagctaa

SEQ ID NO: 2092 - DNA, 27 bp, Homo sapiens
  source 1..27: mol_type = other DNA
gaagtttttttaaaaaaagctaaatta

SEQ ID NO: 2093 - DNA, 27 bp, Homo sapiens
  source 1..27: mol_type = other DNA
aagtttttttaaaaaaagctaaattac

SEQ ID NO: 2094 - DNA, 27 bp, Homo sapiens
  source 1..27: mol_type = other DNA
agtttttttaaaaaaagctaaattaca

SEQ ID NO: 2095 - DNA, 27 bp, Homo sapiens
  source 1..27: mol_type = other DNA
gtttttttaaaaaaagctaaattacat

SEQ ID NO: 2096 - DNA, 27 bp, Homo sapiens
  source 1..27: mol_type = other DNA
tttttttaaaaaaagctaaattacata

SEQ ID NO: 2097 - DNA, 27 bp, Homo sapiens
  source 1..27: mol_type = other DNA
tttaaaaaaagctaaattacatagact

SEQ ID NO: 2098 - DNA, 27 bp, Homo sapiens
  source 1..27: mol_type = other DNA
taaaaaaagctaaattacatagactta

SEQ ID NO: 2099 - DNA, 27 bp, Homo sapiens
  source 1..27: mol_type = other DNA
acttaggcattaacatgtttgtggaag

SEQ ID NO: 2100 - DNA, 27 bp, Homo sapiens
  source 1..27: mol_type = other DNA
cttaggcattaacatgtttgtggaaga

SEQ ID NO: 2101 - DNA, 27 bp, Homo sapiens
  source 1..27: mol_type = other DNA
agcagacgtatattgtatcatttgagt

SEQ ID NO: 2102 - DNA, 27 bp, Homo sapiens
  source 1..27: mol_type = other DNA
gacgtatattgtatcatttgagtgaat

SEQ ID NO: 2103 - DNA, 27 bp, Homo sapiens
  source 1..27: mol_type = other DNA
cgtatattgtatcatttgagtgaatgt

SEQ ID NO: 2104 - DNA, 27 bp, Homo sapiens
  source 1..27: mol_type = other DNA
atattgtatcatttgagtgaatgttcc

SEQ ID NO: 2105 - DNA, 27 bp, Homo sapiens
  source 1..27: mol_type = other DNA
tattgtatcatttgagtgaatgttccc

SEQ ID NO: 2106 - DNA, 27 bp, Homo sapiens
  source 1..27: mol_type = other DNA
attgtatcatttgagtgaatgttccca

SEQ ID NO: 2107 - DNA, 27 bp, Homo sapiens
  source 1..27: mol_type = other DNA
ataggaatttagaacctaacttttata

SEQ ID NO: 2108 - DNA, 27 bp, Homo sapiens
  source 1..27: mol_type = other DNA
taggaatttagaacctaacttttatag

SEQ ID NO: 2109 - DNA, 27 bp, Homo sapiens
  source 1..27: mol_type = other DNA
aatttagaacctaacttttataggtta

SEQ ID NO: 2110 - DNA, 27 bp, Homo sapiens
  source 1..27: mol_type = other DNA
atttagaacctaacttttataggttat

SEQ ID NO: 2111 - DNA, 27 bp, Homo sapiens
  source 1..27: mol_type = other DNA
tttagaacctaacttttataggttatc

SEQ ID NO: 2112 - DNA, 27 bp, Homo sapiens
  source 1..27: mol_type = other DNA
ttagaacctaacttttataggttatca

SEQ ID NO: 2113 - DNA, 27 bp, Homo sapiens
  source 1..27: mol_type = other DNA
ttttataggttatcaaaactgttgtca

SEQ ID NO: 2114 - DNA, 27 bp, Homo sapiens
  source 1..27: mol_type = other DNA
ttataggttatcaaaactgttgtcacc

SEQ ID NO: 2115 - DNA, 27 bp, Homo sapiens
  source 1..27: mol_type = other DNA
aattttgtcctaatatatacatagaaa

SEQ ID NO: 2116 - DNA, 27 bp, Homo sapiens
  source 1..27: mol_type = other DNA
attttgtcctaatatatacatagaaac

SEQ ID NO: 2117 - DNA, 27 bp, Homo sapiens
  source 1..27: mol_type = other DNA
ttttgtcctaatatatacatagaaact

SEQ ID NO: 2118 - DNA, 27 bp, Homo sapiens
  source 1..27: mol_type = other DNA
cctaatatatacatagaaactttgtgg

SEQ ID NO: 2119 - DNA, 27 bp, Homo sapiens
  source 1..27: mol_type = other DNA
tatatacatagaaactttgtggggcat

SEQ ID NO: 2120 - DNA, 27 bp, Homo sapiens
  source 1..27: mol_type = other DNA
cacaagttcatctcatttgtattccat

SEQ ID NO: 2121 - DNA, 27 bp, Homo sapiens
  source 1..27: mol_type = other DNA
ctcatttgtattccattgatttttttt

SEQ ID NO: 2122 - DNA, 27 bp, Homo sapiens
  source 1..27: mol_type = other DNA
tcatttgtattccattgattttttttt

SEQ ID NO: 2123 - DNA, 27 bp, Homo sapiens
  source 1..27: mol_type = other DNA
catttgtattccattgatttttttttt

SEQ ID NO: 2124 - DNA, 27 bp, Homo sapiens
  source 1..27: mol_type = other DNA
atttgtattccattgattttttttttc

SEQ ID NO: 2125 - DNA, 27 bp, Homo sapiens
  source 1..27: mol_type = other DNA
tttgtattccattgattttttttttct

SEQ ID NO: 2126 - DNA, 27 bp, Homo sapiens
  source 1..27: mol_type = other DNA
ttgtattccattgattttttttttctt

SEQ ID NO: 2127 - DNA, 27 bp, Homo sapiens
  source 1..27: mol_type = other DNA
tgtattccattgattttttttttcttc

SEQ ID NO: 2128 - DNA, 27 bp, Homo sapiens
  source 1..27: mol_type = other DNA
cattgattttttttttcttctaaacat

SEQ ID NO: 2129 - DNA, 27 bp, Homo sapiens
  source 1..27: mol_type = other DNA
attgattttttttttcttctaaacatt

SEQ ID NO: 2130 - DNA, 27 bp, Homo sapiens
  source 1..27: mol_type = other DNA
attttttttttcttctaaacatttttt

SEQ ID NO: 2131 - DNA, 27 bp, Homo sapiens
  source 1..27: mol_type = other DNA
ttttttttttcttctaaacattttttc

SEQ ID NO: 2132 - DNA, 27 bp, Homo sapiens
  source 1..27: mol_type = other DNA
tttttttttcttctaaacattttttct

SEQ ID NO: 2133 - DNA, 27 bp, Homo sapiens
  source 1..27: mol_type = other DNA
ttttttttcttctaaacattttttctt

SEQ ID NO: 2134 - DNA, 27 bp, Homo sapiens
  source 1..27: mol_type = other DNA
tttttttcttctaaacattttttcttc

SEQ ID NO: 2135 - DNA, 27 bp, Homo sapiens
  source 1..27: mol_type = other DNA
aacattttttcttcaaacagtatataa

SEQ ID NO: 2136 - DNA, 27 bp, Homo sapiens
  source 1..27: mol_type = other DNA
acattttttcttcaaacagtatataac

SEQ ID NO: 2137 - DNA, 27 bp, Homo sapiens
  source 1..27: mol_type = other DNA
cattttttcttcaaacagtatataact

SEQ ID NO: 2138 - DNA, 27 bp, Homo sapiens
  source 1..27: mol_type = other DNA
attttttcttcaaacagtatataactt

SEQ ID NO: 2139 - DNA, 27 bp, Homo sapiens
  source 1..27: mol_type = other DNA
ttttttcttcaaacagtatataacttt

SEQ ID NO: 2140 - DNA, 27 bp, Homo sapiens
  source 1..27: mol_type = other DNA
ttcaaacagtatataactttttttagg

SEQ ID NO: 2141 - DNA, 27 bp, Homo sapiens
  source 1..27: mol_type = other DNA
acagtatataactttttttaggggatt

SEQ ID NO: 2142 - DNA, 27 bp, Homo sapiens
  source 1..27: mol_type = other DNA
cagtatataactttttttaggggattt

SEQ ID NO: 2143 - DNA, 27 bp, Homo sapiens
  source 1..27: mol_type = other DNA
agtatataactttttttaggggatttt

SEQ ID NO: 2144 - DNA, 27 bp, Homo sapiens
  source 1..27: mol_type = other DNA
gtatataactttttttaggggattttt

SEQ ID NO: 2145 - DNA, 27 bp, Homo sapiens
  source 1..27: mol_type = other DNA
aactttttttaggggatttttttttag

SEQ ID NO: 2146 - DNA, 27 bp, Homo sapiens
  source 1..27: mol_type = other DNA
actttttttaggggatttttttttaga

SEQ ID NO: 2147 - DNA, 27 bp, Homo sapiens
  source 1..27: mol_type = other DNA
gggatttttttttagacagcaaaaact

SEQ ID NO: 2148 - DNA, 27 bp, Homo sapiens
  source 1..27: mol_type = other DNA
ggatttttttttagacagcaaaaacta

SEQ ID NO: 2149 - DNA, 27 bp, Homo sapiens
  source 1..27: mol_type = other DNA
gatttttttttagacagcaaaaactat

SEQ ID NO: 2150 - DNA, 27 bp, Homo sapiens
  source 1..27: mol_type = other DNA
tgaagatttccatttgtcaaaaagtaa

SEQ ID NO: 2151 - DNA, 27 bp, Homo sapiens
  source 1..27: mol_type = other DNA
gaagatttccatttgtcaaaaagtaat

SEQ ID NO: 2152 - DNA, 27 bp, Homo sapiens
  source 1..27: mol_type = other DNA
aagatttccatttgtcaaaaagtaatg

SEQ ID NO: 2153 - DNA, 27 bp, Homo sapiens
  source 1..27: mol_type = other DNA
agatttccatttgtcaaaaagtaatga

SEQ ID NO: 2154 - DNA, 27 bp, Homo sapiens
  source 1..27: mol_type = other DNA
tccatttgtcaaaaagtaatgatttct

SEQ ID NO: 2155 - DNA, 27 bp, Homo sapiens
  source 1..27: mol_type = other DNA
ccatttgtcaaaaagtaatgatttctt

SEQ ID NO: 2156 - DNA, 27 bp, Homo sapiens
  source 1..27: mol_type = other DNA
catttgtcaaaaagtaatgatttcttg

SEQ ID NO: 2157 - DNA, 27 bp, Homo sapiens
  source 1..27: mol_type = other DNA
gtcaaaaagtaatgatttcttgataat

SEQ ID NO: 2158 - DNA, 27 bp, Homo sapiens
  source 1..27: mol_type = other DNA
tcaaaaagtaatgatttcttgataatt

SEQ ID NO: 2159 - DNA, 27 bp, Homo sapiens
  source 1..27: mol_type = other DNA
caaaaagtaatgatttcttgataattg

SEQ ID NO: 2160 - DNA, 27 bp, Homo sapiens
  source 1..27: mol_type = other DNA
aaaaagtaatgatttcttgataattgt

SEQ ID NO: 2161 - DNA, 27 bp, Homo sapiens
  source 1..27: mol_type = other DNA
aaagtaatgatttcttgataattgtgt

SEQ ID NO: 2162 - DNA, 27 bp, Homo sapiens
  source 1..27: mol_type = other DNA
agtaatgatttcttgataattgtgtag

SEQ ID NO: 2163 - DNA, 27 bp, Homo sapiens
  source 1..27: mol_type = other DNA
gtaatgatttcttgataattgtgtagt

SEQ ID NO: 2164 - DNA, 27 bp, Homo sapiens
  source 1..27: mol_type = other DNA
aatgatttcttgataattgtgtagtaa

SEQ ID NO: 2165 - DNA, 27 bp, Homo sapiens
  source 1..27: mol_type = other DNA
atgatttcttgataattgtgtagtaat

SEQ ID NO: 2166 - DNA, 27 bp, Homo sapiens
  source 1..27: mol_type = other DNA
ttcttgataattgtgtagtaatgtttt

SEQ ID NO: 2167 - DNA, 27 bp, Homo sapiens
  source 1..27: mol_type = other DNA
tcttgataattgtgtagtaatgttttt

SEQ ID NO: 2168 - DNA, 27 bp, Homo sapiens
  source 1..27: mol_type = other DNA
cttgataattgtgtagtaatgtttttt

SEQ ID NO: 2169 - DNA, 27 bp, Homo sapiens
  source 1..27: mol_type = other DNA
tgataattgtgtagtaatgttttttag

SEQ ID NO: 2170 - DNA, 27 bp, Homo sapiens
  source 1..27: mol_type = other DNA
taattgtgtagtaatgttttttagaac

SEQ ID NO: 2171 - DNA, 27 bp, Homo sapiens
  source 1..27: mol_type = other DNA
attgtgtagtaatgttttttagaaccc

SEQ ID NO: 2172 - DNA, 27 bp, Homo sapiens
  source 1..27: mol_type = other DNA
ttgtgtagtaatgttttttagaaccca

SEQ ID NO: 2173 - DNA, 27 bp, Homo sapiens
  source 1..27: mol_type = other DNA
ccttaaagctgaatttatatttagtaa

SEQ ID NO: 2174 - DNA, 27 bp, Homo sapiens
  source 1..27: mol_type = other DNA
ttaaagctgaatttatatttagtaact

SEQ ID NO: 2175 - DNA, 27 bp, Homo sapiens
  source 1..27: mol_type = other DNA
aatttatatttagtaacttctgtgtta

SEQ ID NO: 2176 - DNA, 27 bp, Homo sapiens
  source 1..27: mol_type = other DNA
atttatatttagtaacttctgtgttaa

SEQ ID NO: 2177 - DNA, 27 bp, Homo sapiens
  source 1..27: mol_type = other DNA
tttatatttagtaacttctgtgttaat

SEQ ID NO: 2178 - DNA, 27 bp, Homo sapiens
  source 1..27: mol_type = other DNA
atttagtaacttctgtgttaatactgg

SEQ ID NO: 2179 - DNA, 27 bp, Homo sapiens
  source 1..27: mol_type = other DNA
actgaatagctgtcataaaatgaaact

SEQ ID NO: 2180 - DNA, 27 bp, Homo sapiens
  source 1..27: mol_type = other DNA
ctgaatagctgtcataaaatgaaactt

SEQ ID NO: 2181 - DNA, 27 bp, Homo sapiens
  source 1..27: mol_type = other DNA
taaaatgaaactttctttctaaagaaa

SEQ ID NO: 2182 - DNA, 27 bp, Homo sapiens
  source 1..27: mol_type = other DNA
aaaatgaaactttctttctaaagaaag

SEQ ID NO: 2183 - DNA, 27 bp, Homo sapiens
  source 1..27: mol_type = other DNA
aaatgaaactttctttctaaagaaaga

SEQ ID NO: 2184 - DNA, 27 bp, Homo sapiens
  source 1..27: mol_type = other DNA
atgaaactttctttctaaagaaagata

SEQ ID NO: 2185 - DNA, 27 bp, Homo sapiens
  source 1..27: mol_type = other DNA
aactttctttctaaagaaagatactca

SEQ ID NO: 2186 - DNA, 27 bp, Homo sapiens
  source 1..27: mol_type = other DNA
cacatgagttcttgaagaatagtcata

SEQ ID NO: 2187 - DNA, 27 bp, Homo sapiens
  source 1..27: mol_type = other DNA
tcttgaagaatagtcataactagatta

SEQ ID NO: 2188 - DNA, 27 bp, Homo sapiens
  source 1..27: mol_type = other DNA
cttgaagaatagtcataactagattaa

SEQ ID NO: 2189 - DNA, 27 bp, Homo sapiens
  source 1..27: mol_type = other DNA
ttgaagaatagtcataactagattaag

SEQ ID NO: 2190 - DNA, 27 bp, Homo sapiens
  source 1..27: mol_type = other DNA
aagaatagtcataactagattaagatc

SEQ ID NO: 2191 - DNA, 27 bp, Homo sapiens
  source 1..27: mol_type = other DNA
agaatagtcataactagattaagatct

SEQ ID NO: 2192 - DNA, 27 bp, Homo sapiens
  source 1..27: mol_type = other DNA
gaatagtcataactagattaagatctg

SEQ ID NO: 2193 - DNA, 27 bp, Homo sapiens
  source 1..27: mol_type = other DNA
aatagtcataactagattaagatctgt

SEQ ID NO: 2194 - DNA, 27 bp, Homo sapiens
  source 1..27: mol_type = other DNA
gtcataactagattaagatctgtgttt

SEQ ID NO: 2195 - DNA, 27 bp, Homo sapiens
  source 1..27: mol_type = other DNA
actagattaagatctgtgttttagttt

SEQ ID NO: 2196 - DNA, 27 bp, Homo sapiens
  source 1..27: mol_type = other DNA
tagattaagatctgtgttttagtttaa

SEQ ID NO: 2197 - DNA, 27 bp, Homo sapiens
  source 1..27: mol_type = other DNA
agattaagatctgtgttttagtttaat

SEQ ID NO: 2198 - DNA, 27 bp, Homo sapiens
  source 1..27: mol_type = other DNA
attaagatctgtgttttagtttaatag

SEQ ID NO: 2199 - DNA, 27 bp, Homo sapiens
  source 1..27: mol_type = other DNA
tctgtgttttagtttaatagtttgaag

SEQ ID NO: 2200 - DNA, 27 bp, Homo sapiens
  source 1..27: mol_type = other DNA
ctgtgttttagtttaatagtttgaagt

SEQ ID NO: 2201 - DNA, 27 bp, Homo sapiens
  source 1..27: mol_type = other DNA
gtgttttagtttaatagtttgaagtgc

SEQ ID NO: 2202 - DNA, 27 bp, Homo sapiens
  source 1..27: mol_type = other DNA
gttttagtttaatagtttgaagtgcct

SEQ ID NO: 2203 - DNA, 27 bp, Homo sapiens
  source 1..27: mol_type = other DNA
ttttagtttaatagtttgaagtgcctg

SEQ ID NO: 2204 - DNA, 27 bp, Homo sapiens
  source 1..27: mol_type = other DNA
gtttgggataatgataggtaatttaga

SEQ ID NO: 2205 - DNA, 27 bp, Homo sapiens
  source 1..27: mol_type = other DNA
ttgggataatgataggtaatttagatg

SEQ ID NO: 2206 - DNA, 27 bp, Homo sapiens
  source 1..27: mol_type = other DNA
ggataatgataggtaatttagatgaat

SEQ ID NO: 2207 - DNA, 27 bp, Homo sapiens
  source 1..27: mol_type = other DNA
gataatgataggtaatttagatgaatt

SEQ ID NO: 2208 - DNA, 27 bp, Homo sapiens
  source 1..27: mol_type = other DNA
aatgataggtaatttagatgaatttag

SEQ ID NO: 2209 - DNA, 27 bp, Homo sapiens
  source 1..27: mol_type = other DNA
atgataggtaatttagatgaatttagg

SEQ ID NO: 2210 - DNA, 27 bp, Homo sapiens
  source 1..27: mol_type = other DNA
aggtaatttagatgaatttaggggaaa

SEQ ID NO: 2211 - DNA, 27 bp, Homo sapiens
  source 1..27: mol_type = other DNA
gtaatttagatgaatttaggggaaaaa

SEQ ID NO: 2212 - DNA, 27 bp, Homo sapiens
  source 1..27: mol_type = other DNA
agatgaatttaggggaaaaaaaagtta

SEQ ID NO: 2213 - DNA, 27 bp, Homo sapiens
  source 1..27: mol_type = other DNA
gatgaatttaggggaaaaaaaagttat

SEQ ID NO: 2214 - DNA, 27 bp, Homo sapiens
  source 1..27: mol_type = other DNA
gggaaaaaaaagttatctgcagatatg

SEQ ID NO: 2215 - DNA, 27 bp, Homo sapiens
  source 1..27: mol_type = other DNA
ggaaaaaaaagttatctgcagatatgt

SEQ ID NO: 2216 - DNA, 27 bp, Homo sapiens
  source 1..27: mol_type = other DNA
aaaaagttatctgcagatatgttgagg

SEQ ID NO: 2217 - DNA, 27 bp, Homo sapiens
  source 1..27: mol_type = other DNA
gtcttgtgttttcatgttgaaaatact

SEQ ID NO: 2218 - DNA, 27 bp, Homo sapiens
  source 1..27: mol_type = other DNA
tcttgtgttttcatgttgaaaatactt

SEQ ID NO: 2219 - DNA, 27 bp, Homo sapiens
  source 1..27: mol_type = other DNA
cttgtgttttcatgttgaaaatacttt

SEQ ID NO: 2220 - DNA, 27 bp, Homo sapiens
  source 1..27: mol_type = other DNA
catgttgaaaatacttttgcatttttc

SEQ ID NO: 2221 - DNA, 27 bp, Homo sapiens
  source 1..27: mol_type = other DNA
atgttgaaaatacttttgcatttttcc

SEQ ID NO: 2222 - DNA, 27 bp, Homo sapiens
  source 1..27: mol_type = other DNA
tgttgaaaatacttttgcatttttcct

SEQ ID NO: 2223 - DNA, 27 bp, Homo sapiens
  source 1..27: mol_type = other DNA
gttgaaaatacttttgcatttttcctt

SEQ ID NO: 2224 - DNA, 27 bp, Homo sapiens
  source 1..27: mol_type = other DNA
cttttgcatttttcctttgagtgccaa

SEQ ID NO: 2225 - DNA, 27 bp, Homo sapiens
  source 1..27: mol_type = other DNA
tgagtgccaatttcttactagtactat

SEQ ID NO: 2226 - DNA, 27 bp, Homo sapiens
  source 1..27: mol_type = other DNA
gccaatttcttactagtactatttctt

SEQ ID NO: 2227 - DNA, 27 bp, Homo sapiens
  source 1..27: mol_type = other DNA
ccaatttcttactagtactatttctta

SEQ ID NO: 2228 - DNA, 27 bp, Homo sapiens
  source 1..27: mol_type = other DNA
tactagtactatttcttaatgtaacat

SEQ ID NO: 2229 - DNA, 27 bp, Homo sapiens
  source 1..27: mol_type = other DNA
actagtactatttcttaatgtaacatg

SEQ ID NO: 2230 - DNA, 27 bp, Homo sapiens
  source 1..27: mol_type = other DNA
tactatttcttaatgtaacatgtttac

SEQ ID NO: 2231 - DNA, 27 bp, Homo sapiens
  source 1..27: mol_type = other DNA
actatttcttaatgtaacatgtttacc

SEQ ID NO: 2232 - DNA, 27 bp, Homo sapiens
  source 1..27: mol_type = other DNA
ctatttcttaatgtaacatgtttacct

SEQ ID NO: 2233 - DNA, 27 bp, Homo sapiens
  source 1..27: mol_type = other DNA
ttaatgtaacatgtttacctggaatgt

SEQ ID NO: 2234 - DNA, 27 bp, Homo sapiens
  source 1..27: mol_type = other DNA
cctggaatgtattttaactatttttgt

SEQ ID NO: 2235 - DNA, 27 bp, Homo sapiens
  source 1..27: mol_type = other DNA
tggaatgtattttaactatttttgtat

SEQ ID NO: 2236 - DNA, 27 bp, Homo sapiens
  source 1..27: mol_type = other DNA
ggaatgtattttaactatttttgtata

SEQ ID NO: 2237 - DNA, 27 bp, Homo sapiens
  source 1..27: mol_type = other DNA
gaatgtattttaactatttttgtatag

SEQ ID NO: 2238 - DNA, 27 bp, Homo sapiens
  source 1..27: mol_type = other DNA
aatgtattttaactatttttgtatagt

SEQ ID NO: 2239 - DNA, 27 bp, Homo sapiens
  source 1..27: mol_type = other DNA
tgtattttaactatttttgtatagtgt

SEQ ID NO: 2240 - DNA, 27 bp, Homo sapiens
  source 1..27: mol_type = other DNA
tattttaactatttttgtatagtgtaa

SEQ ID NO: 2241 - DNA, 27 bp, Homo sapiens
  source 1..27: mol_type = other DNA
attttaactatttttgtatagtgtaaa

SEQ ID NO: 2242 - DNA, 27 bp, Homo sapiens
  source 1..27: mol_type = other DNA
ttttaactatttttgtatagtgtaaac

SEQ ID NO: 2243 - DNA, 27 bp, Homo sapiens
  source 1..27: mol_type = other DNA
tatttttgtatagtgtaaactgaaaca

SEQ ID NO: 2244 - DNA, 27 bp, Homo sapiens
  source 1..27: mol_type = other DNA
atttttgtatagtgtaaactgaaacat

SEQ ID NO: 2245 - DNA, 27 bp, Homo sapiens
  source 1..27: mol_type = other DNA
tttttgtatagtgtaaactgaaacatg

SEQ ID NO: 2246 - DNA, 27 bp, Homo sapiens
  source 1..27: mol_type = other DNA
aactgaaacatgcacattttgtacatt

SEQ ID NO: 2247 - DNA, 27 bp, Homo sapiens
  source 1..27: mol_type = other DNA
aacatgcacattttgtacattgtgctt

SEQ ID NO: 2248 - DNA, 27 bp, Homo sapiens
  source 1..27: mol_type = other DNA
tccagttgttttccatcatttggttgc

SEQ ID NO: 2249 - DNA, 27 bp, Homo sapiens
  source 1..27: mol_type = other DNA
cagttgttttccatcatttggttgcgc

SEQ ID NO: 2250 - DNA, 27 bp, Homo sapiens
  source 1..27: mol_type = other DNA
atgttggtcatatcaaacattaaaaat

SEQ ID NO: 2251 - DNA, 27 bp, Homo sapiens
  source 1..27: mol_type = other DNA
tgttggtcatatcaaacattaaaaatg

SEQ ID NO: 2252 - DNA, 27 bp, Homo sapiens
  source 1..27: mol_type = other DNA
gttggtcatatcaaacattaaaaatga

SEQ ID NO: 2253 - DNA, 27 bp, Homo sapiens
  source 1..27: mol_type = other DNA
gtcatatcaaacattaaaaatgaccac

SEQ ID NO: 2254 - DNA, 27 bp, Homo sapiens
  source 1..27: mol_type = other DNA
aaaatgaccactcttttaattgaaatt

SEQ ID NO: 2255 - DNA, 27 bp, Homo sapiens
  source 1..27: mol_type = other DNA
aaatgaccactcttttaattgaaatta

SEQ ID NO: 2256 - DNA, 27 bp, Homo sapiens
  source 1..27: mol_type = other DNA
ctcttttaattgaaattaacttttaaa

SEQ ID NO: 2257 - DNA, 27 bp, Homo sapiens
  source 1..27: mol_type = other DNA
tcttttaattgaaattaacttttaaat

SEQ ID NO: 2258 - DNA, 27 bp, Homo sapiens
  source 1..27: mol_type = other DNA
ttttaattgaaattaacttttaaatgt

SEQ ID NO: 2259 - DNA, 27 bp, Homo sapiens
  source 1..27: mol_type = other DNA
ttaattgaaattaacttttaaatgttt

SEQ ID NO: 2260 - DNA, 27 bp, Homo sapiens
  source 1..27: mol_type = other DNA
taattgaaattaacttttaaatgttta

SEQ ID NO: 2261 - DNA, 27 bp, Homo sapiens
  source 1..27: mol_type = other DNA
aattgaaattaacttttaaatgtttat

SEQ ID NO: 2262 - DNA, 27 bp, Homo sapiens
  source 1..27: mol_type = other DNA
attgaaattaacttttaaatgtttata

SEQ ID NO: 2263 - DNA, 27 bp, Homo sapiens
  source 1..27: mol_type = other DNA
ttgaaattaacttttaaatgtttatag

SEQ ID NO: 2264 - DNA, 27 bp, Homo sapiens
  source 1..27: mol_type = other DNA
tgaaattaacttttaaatgtttatagg

SEQ ID NO: 2265 - DNA, 27 bp, Homo sapiens
  source 1..27: mol_type = other DNA
aattaacttttaaatgtttataggagt

SEQ ID NO: 2266 - DNA, 27 bp, Homo sapiens
  source 1..27: mol_type = other DNA
aacttttaaatgtttataggagtatgt

SEQ ID NO: 2267 - DNA, 27 bp, Homo sapiens
  source 1..27: mol_type = other DNA
tttaaatgtttataggagtatgtgctg

SEQ ID NO: 2268 - DNA, 27 bp, Homo sapiens
  source 1..27: mol_type = other DNA
ttaaatgtttataggagtatgtgctgt

SEQ ID NO: 2269 - DNA, 27 bp, Homo sapiens
  source 1..27: mol_type = other DNA
gctgtgaagtgatctaaaatttgtaat

SEQ ID NO: 2270 - DNA, 27 bp, Homo sapiens
  source 1..27: mol_type = other DNA
tgtgaagtgatctaaaatttgtaatat

SEQ ID NO: 2271 - DNA, 27 bp, Homo sapiens
  source 1..27: mol_type = other DNA
gtgaagtgatctaaaatttgtaatatt

SEQ ID NO: 2272 - DNA, 27 bp, Homo sapiens
  source 1..27: mol_type = other DNA
tgaagtgatctaaaatttgtaatattt

SEQ ID NO: 2273 - DNA, 27 bp, Homo sapiens
  source 1..27: mol_type = other DNA
gaagtgatctaaaatttgtaatatttt

SEQ ID NO: 2274 - DNA, 27 bp, Homo sapiens
  source 1..27: mol_type = other DNA
aagtgatctaaaatttgtaatattttt

SEQ ID NO: 2275 - DNA, 27 bp, Homo sapiens
  source 1..27: mol_type = other DNA
agtgatctaaaatttgtaatatttttg

SEQ ID NO: 2276 - DNA, 27 bp, Homo sapiens
  source 1..27: mol_type = other DNA
atctaaaatttgtaatatttttgtcat

SEQ ID NO: 2277 - DNA, 27 bp, Homo sapiens
  source 1..27: mol_type = other DNA
tctaaaatttgtaatatttttgtcatg

SEQ ID NO: 2278 - DNA, 27 bp, Homo sapiens
  source 1..27: mol_type = other DNA
aaatttgtaatatttttgtcatgaact

SEQ ID NO: 2279 - DNA, 27 bp, Homo sapiens
  source 1..27: mol_type = other DNA
aatttgtaatatttttgtcatgaactg

SEQ ID NO: 2280 - DNA, 27 bp, Homo sapiens
  source 1..27: mol_type = other DNA
atttgtaatatttttgtcatgaactgt

SEQ ID NO: 2281 - DNA, 27 bp, Homo sapiens
  source 1..27: mol_type = other DNA
gtaatatttttgtcatgaactgtacta

SEQ ID NO: 2282 - DNA, 27 bp, Homo sapiens
  source 1..27: mol_type = other DNA
taatatttttgtcatgaactgtactac

SEQ ID NO: 2283 - DNA, 27 bp, Homo sapiens
  source 1..27: mol_type = other DNA
aactgtactactcctaattattgtaat

SEQ ID NO: 2284 - DNA, 27 bp, Homo sapiens
  source 1..27: mol_type = other DNA
actgtactactcctaattattgtaatg

SEQ ID NO: 2285 - DNA, 27 bp, Homo sapiens
  source 1..27: mol_type = other DNA
tcctaattattgtaatgtaataaaaat

SEQ ID NO: 2286 - DNA, 27 bp, Homo sapiens
  source 1..27: mol_type = other DNA
cctaattattgtaatgtaataaaaata

SEQ ID NO: 2287 - DNA, 27 bp, Homo sapiens
  source 1..27: mol_type = other DNA
taattattgtaatgtaataaaaatagt

SEQ ID NO: 2288 - DNA, 27 bp, Homo sapiens
  source 1..27: mol_type = other DNA
attattgtaatgtaataaaaatagtta

SEQ ID NO: 2289 - DNA, 27 bp, Homo sapiens
  source 1..27: mol_type = other DNA
ttattgtaatgtaataaaaatagttac

SEQ ID NO: 2290 - DNA, 27 bp, Homo sapiens
  source 1..27: mol_type = other DNA
attgtaatgtaataaaaatagttacag

SEQ ID NO: 2291 - DNA, 27 bp, Homo sapiens
  source 1..27: mol_type = other DNA
ttgtaatgtaataaaaatagttacagt

SEQ ID NO: 2292 - DNA, 27 bp, Homo sapiens
  source 1..27: mol_type = other DNA
aatgtaataaaaatagttacagtgaca

SEQ ID NO: 2293 - DNA, 27 bp, Homo sapiens
  source 1..27: mol_type = other DNA
atgtaataaaaatagttacagtgacaa

SEQ ID NO: 2294 - DNA, 27 bp, Homo sapiens
  source 1..27: mol_type = other DNA
tgtaataaaaatagttacagtgacaaa

SEQ ID NO: 2295 - DNA, 27 bp, Homo sapiens
  source 1..27: mol_type = other DNA
aaatagttacagtgacaaaaaaaaaaa

SEQ ID NO: 2296 - DNA, 27 bp, Homo sapiens
  source 1..27: mol_type = other DNA
aatagttacagtgacaaaaaaaaaaaa

SEQ ID NO: 2297 - DNA, 27 bp, Homo sapiens
  source 1..27: mol_type = other DNA
tagttacagtgacaaaaaaaaaaaaaa

SEQ ID NO: 2298 - RNA, 27 nt, synthetic construct
  misc_feature 1..27: note = Description of Artificial Sequence: Syntheticoligonucleotide
  source 1..27: mol_type = other RNA
agtttatattcagtcattttcagcagg

SEQ ID NO: 2299 - RNA, 27 nt, synthetic construct
  misc_feature 1..27: note = Description of Artificial Sequence: Syntheticoligonucleotide
  source 1..27: mol_type = other RNA
accacaagtttatattcagtcattttc

SEQ ID NO: 2300 - RNA, 27 nt, synthetic construct
  misc_feature 1..27: note = Description of Artificial Sequence: Syntheticoligonucleotide
  source 1..27: mol_type = other RNA
aactaccacaagtttatattcagtcat

SEQ ID NO: 2301 - RNA, 27 nt, synthetic construct
  misc_feature 1..27: note = Description of Artificial Sequence: Syntheticoligonucleotide
  source 1..27: mol_type = other RNA
tccacaaaatgattctgaattagctgt

SEQ ID NO: 2302 - RNA, 27 nt, synthetic construct
  misc_feature 1..27: note = Description of Artificial Sequence: Syntheticoligonucleotide
  source 1..27: mol_type = other RNA
tcctctattgttggatcatattcgtcc

SEQ ID NO: 2303 - RNA, 27 nt, synthetic construct
  misc_feature 1..27: note = Description of Artificial Sequence: Syntheticoligonucleotide
  source 1..27: mol_type = other RNA
gtttctccatcaattactacttgcttc

SEQ ID NO: 2304 - RNA, 27 nt, synthetic construct
  misc_feature 1..27: note = Description of Artificial Sequence: Syntheticoligonucleotide
  source 1..27: mol_type = other RNA
ggcaaatacacaaagaaagccctcccc

SEQ ID NO: 2305 - RNA, 27 nt, synthetic construct
  misc_feature 1..27: note = Description of Artificial Sequence: Syntheticoligonucleotide
  source 1..27: mol_type = other RNA
attatttatggcaaatacacaaagaaa

SEQ ID NO: 2306 - RNA, 27 nt, synthetic construct
  misc_feature 1..27: note = Description of Artificial Sequence: Syntheticoligonucleotide
  source 1..27: mol_type = other RNA
tattatttatggcaaatacacaaagaa

SEQ ID NO: 2307 - RNA, 27 nt, synthetic construct
  misc_feature 1..27: note = Description of Artificial Sequence: Syntheticoligonucleotide
  source 1..27: mol_type = other RNA
gtattatttatggcaaatacacaaaga

SEQ ID NO: 2308 - RNA, 27 nt, synthetic construct
  misc_feature 1..27: note = Description of Artificial Sequence: Syntheticoligonucleotide
  source 1..27: mol_type = other RNA
agtattatttatggcaaatacacaaag

SEQ ID NO: 2309 - RNA, 27 nt, synthetic construct
  misc_feature 1..27: note = Description of Artificial Sequence: Syntheticoligonucleotide
  source 1..27: mol_type = other RNA
atttagtattatttatggcaaatacac

SEQ ID NO: 2310 - RNA, 27 nt, synthetic construct
  misc_feature 1..27: note = Description of Artificial Sequence: Syntheticoligonucleotide
  source 1..27: mol_type = other RNA
gatttagtattatttatggcaaataca

SEQ ID NO: 2311 - RNA, 27 nt, synthetic construct
  misc_feature 1..27: note = Description of Artificial Sequence: Syntheticoligonucleotide
  source 1..27: mol_type = other RNA
tcaaatgatttagtattatttatggca

SEQ ID NO: 2312 - RNA, 27 nt, synthetic construct
  misc_feature 1..27: note = Description of Artificial Sequence: Syntheticoligonucleotide
  source 1..27: mol_type = other RNA
ttcaaatgatttagtattatttatggc

SEQ ID NO: 2313 - RNA, 27 nt, synthetic construct
  misc_feature 1..27: note = Description of Artificial Sequence: Syntheticoligonucleotide
  source 1..27: mol_type = other RNA
tcttcaaatgatttagtattatttatg

SEQ ID NO: 2314 - RNA, 27 nt, synthetic construct
  misc_feature 1..27: note = Description of Artificial Sequence: Syntheticoligonucleotide
  source 1..27: mol_type = other RNA
atcttcaaatgatttagtattatttat

SEQ ID NO: 2315 - RNA, 27 nt, synthetic construct
  misc_feature 1..27: note = Description of Artificial Sequence: Syntheticoligonucleotide
  source 1..27: mol_type = other RNA
tatcttcaaatgatttagtattattta

SEQ ID NO: 2316 - RNA, 27 nt, synthetic construct
  misc_feature 1..27: note = Description of Artificial Sequence: Syntheticoligonucleotide
  source 1..27: mol_type = other RNA
atatcttcaaatgatttagtattattt

SEQ ID NO: 2317 - RNA, 27 nt, synthetic construct
  misc_feature 1..27: note = Description of Artificial Sequence: Syntheticoligonucleotide
  source 1..27: mol_type = other RNA
tctataatggtgaatatcttcaaatga

SEQ ID NO: 2318 - RNA, 27 nt, synthetic construct
  misc_feature 1..27: note = Description of Artificial Sequence: Syntheticoligonucleotide
  source 1..27: mol_type = other RNA
tctctataatggtgaatatcttcaaat

SEQ ID NO: 2319 - RNA, 27 nt, synthetic construct
  misc_feature 1..27: note = Description of Artificial Sequence: Syntheticoligonucleotide
  source 1..27: mol_type = other RNA
ttctctataatggtgaatatcttcaaa

SEQ ID NO: 2320 - RNA, 27 nt, synthetic construct
  misc_feature 1..27: note = Description of Artificial Sequence: Syntheticoligonucleotide
  source 1..27: mol_type = other RNA
gttctctataatggtgaatatcttcaa

SEQ ID NO: 2321 - RNA, 27 nt, synthetic construct
  misc_feature 1..27: note = Description of Artificial Sequence: Syntheticoligonucleotide
  source 1..27: mol_type = other RNA
tgttctctataatggtgaatatcttca

SEQ ID NO: 2322 - RNA, 27 nt, synthetic construct
  misc_feature 1..27: note = Description of Artificial Sequence: Syntheticoligonucleotide
  source 1..27: mol_type = other RNA
tcttttaatttgttctctataatggtg

SEQ ID NO: 2323 - RNA, 27 nt, synthetic construct
  misc_feature 1..27: note = Description of Artificial Sequence: Syntheticoligonucleotide
  source 1..27: mol_type = other RNA
actcttttaatttgttctctataatgg

SEQ ID NO: 2324 - RNA, 27 nt, synthetic construct
  misc_feature 1..27: note = Description of Artificial Sequence: Syntheticoligonucleotide
  source 1..27: mol_type = other RNA
aactcttttaatttgttctctataatg

SEQ ID NO: 2325 - RNA, 27 nt, synthetic construct
  misc_feature 1..27: note = Description of Artificial Sequence: Syntheticoligonucleotide
  source 1..27: mol_type = other RNA
taactcttttaatttgttctctataat

SEQ ID NO: 2326 - RNA, 27 nt, synthetic construct
  misc_feature 1..27: note = Description of Artificial Sequence: Syntheticoligonucleotide
  source 1..27: mol_type = other RNA
ttaactcttttaatttgttctctataa

SEQ ID NO: 2327 - RNA, 27 nt, synthetic construct
  misc_feature 1..27: note = Description of Artificial Sequence: Syntheticoligonucleotide
  source 1..27: mol_type = other RNA
gcaaatcacatttatttcctactagga

SEQ ID NO: 2328 - RNA, 27 nt, synthetic construct
  misc_feature 1..27: note = Description of Artificial Sequence: Syntheticoligonucleotide
  source 1..27: mol_type = other RNA
ggcaaatcacatttatttcctactagg

SEQ ID NO: 2329 - RNA, 27 nt, synthetic construct
  misc_feature 1..27: note = Description of Artificial Sequence: Syntheticoligonucleotide
  source 1..27: mol_type = other RNA
aataaaaggaattccataacttcttgc

SEQ ID NO: 2330 - RNA, 27 nt, synthetic construct
  misc_feature 1..27: note = Description of Artificial Sequence: Syntheticoligonucleotide
  source 1..27: mol_type = other RNA
ttcaataaaaggaattccataacttct

SEQ ID NO: 2331 - RNA, 27 nt, synthetic construct
  misc_feature 1..27: note = Description of Artificial Sequence: Syntheticoligonucleotide
  source 1..27: mol_type = other RNA
tttcaataaaaggaattccataacttc

SEQ ID NO: 2332 - RNA, 27 nt, synthetic construct
  misc_feature 1..27: note = Description of Artificial Sequence: Syntheticoligonucleotide
  source 1..27: mol_type = other RNA
gtttcaataaaaggaattccataactt

SEQ ID NO: 2333 - RNA, 27 nt, synthetic construct
  misc_feature 1..27: note = Description of Artificial Sequence: Syntheticoligonucleotide
  source 1..27: mol_type = other RNA
tgtttcaataaaaggaattccataact

SEQ ID NO: 2334 - RNA, 27 nt, synthetic construct
  misc_feature 1..27: note = Description of Artificial Sequence: Syntheticoligonucleotide
  source 1..27: mol_type = other RNA
accaatgtataaaaagcatcctccact

SEQ ID NO: 2335 - RNA, 27 nt, synthetic construct
  misc_feature 1..27: note = Description of Artificial Sequence: Syntheticoligonucleotide
  source 1..27: mol_type = other RNA
tcaccaatgtataaaaagcatcctcca

SEQ ID NO: 2336 - RNA, 27 nt, synthetic construct
  misc_feature 1..27: note = Description of Artificial Sequence: Syntheticoligonucleotide
  source 1..27: mol_type = other RNA
tctttgctgatttttttcaatctgtat

SEQ ID NO: 2337 - RNA, 27 nt, synthetic construct
  misc_feature 1..27: note = Description of Artificial Sequence: Syntheticoligonucleotide
  source 1..27: mol_type = other RNA
ttctttgctgatttttttcaatctgta

SEQ ID NO: 2338 - RNA, 27 nt, synthetic construct
  misc_feature 1..27: note = Description of Artificial Sequence: Syntheticoligonucleotide
  source 1..27: mol_type = other RNA
tcttctttgctgatttttttcaatctg

SEQ ID NO: 2339 - RNA, 27 nt, synthetic construct
  misc_feature 1..27: note = Description of Artificial Sequence: Syntheticoligonucleotide
  source 1..27: mol_type = other RNA
ttcttctttgctgatttttttcaatct

SEQ ID NO: 2340 - RNA, 27 nt, synthetic construct
  misc_feature 1..27: note = Description of Artificial Sequence: Syntheticoligonucleotide
  source 1..27: mol_type = other RNA
tttcttctttgctgatttttttcaatc

SEQ ID NO: 2341 - RNA, 27 nt, synthetic construct
  misc_feature 1..27: note = Description of Artificial Sequence: Syntheticoligonucleotide
  source 1..27: mol_type = other RNA
ttttcttctttgctgatttttttcaat

SEQ ID NO: 2342 - RNA, 27 nt, synthetic construct
  misc_feature 1..27: note = Description of Artificial Sequence: Syntheticoligonucleotide
  source 1..27: mol_type = other RNA
ttttttaattttcacacagccaggagt

SEQ ID NO: 2343 - RNA, 27 nt, synthetic construct
  misc_feature 1..27: note = Description of Artificial Sequence: Syntheticoligonucleotide
  source 1..27: mol_type = other RNA
tgcattttttaattttcacacagccag

SEQ ID NO: 2344 - RNA, 27 nt, synthetic construct
  misc_feature 1..27: note = Description of Artificial Sequence: Syntheticoligonucleotide
  source 1..27: mol_type = other RNA
ataatgcattttttaattttcacacag

SEQ ID NO: 2345 - RNA, 27 nt, synthetic construct
  misc_feature 1..27: note = Description of Artificial Sequence: Syntheticoligonucleotide
  source 1..27: mol_type = other RNA
tataatgcattttttaattttcacaca

SEQ ID NO: 2346 - RNA, 27 nt, synthetic construct
  misc_feature 1..27: note = Description of Artificial Sequence: Syntheticoligonucleotide
  source 1..27: mol_type = other RNA
ttataatgcattttttaattttcacac

SEQ ID NO: 2347 - RNA, 27 nt, synthetic construct
  misc_feature 1..27: note = Description of Artificial Sequence: Syntheticoligonucleotide
  source 1..27: mol_type = other RNA
attataatgcattttttaattttcaca

SEQ ID NO: 2348 - RNA, 27 nt, synthetic construct
  misc_feature 1..27: note = Description of Artificial Sequence: Syntheticoligonucleotide
  source 1..27: mol_type = other RNA
acattataatgcattttttaattttca

SEQ ID NO: 2349 - RNA, 27 nt, synthetic construct
  misc_feature 1..27: note = Description of Artificial Sequence: Syntheticoligonucleotide
  source 1..27: mol_type = other RNA
tacattataatgcattttttaattttc

SEQ ID NO: 2350 - RNA, 27 nt, synthetic construct
  misc_feature 1..27: note = Description of Artificial Sequence: Syntheticoligonucleotide
  source 1..27: mol_type = other RNA
ttacattataatgcattttttaatttt

SEQ ID NO: 2351 - RNA, 27 nt, synthetic construct
  misc_feature 1..27: note = Description of Artificial Sequence: Syntheticoligonucleotide
  source 1..27: mol_type = other RNA
attacattataatgcattttttaattt

SEQ ID NO: 2352 - RNA, 27 nt, synthetic construct
  misc_feature 1..27: note = Description of Artificial Sequence: Syntheticoligonucleotide
  source 1..27: mol_type = other RNA
agattacattataatgcattttttaat

SEQ ID NO: 2353 - RNA, 27 nt, synthetic construct
  misc_feature 1..27: note = Description of Artificial Sequence: Syntheticoligonucleotide
  source 1..27: mol_type = other RNA
aacacccagattacattataatgcatt

SEQ ID NO: 2354 - RNA, 27 nt, synthetic construct
  misc_feature 1..27: note = Description of Artificial Sequence: Syntheticoligonucleotide
  source 1..27: mol_type = other RNA
tctttatgttttcgaatttctcgaact

SEQ ID NO: 2355 - RNA, 27 nt, synthetic construct
  misc_feature 1..27: note = Description of Artificial Sequence: Syntheticoligonucleotide
  source 1..27: mol_type = other RNA
ttctttatgttttcgaatttctcgaac

SEQ ID NO: 2356 - RNA, 27 nt, synthetic construct
  misc_feature 1..27: note = Description of Artificial Sequence: Syntheticoligonucleotide
  source 1..27: mol_type = other RNA
tttctttatgttttcgaatttctcgaa

SEQ ID NO: 2357 - RNA, 27 nt, synthetic construct
  misc_feature 1..27: note = Description of Artificial Sequence: Syntheticoligonucleotide
  source 1..27: mol_type = other RNA
tcttttctttatgttttcgaatttctc

SEQ ID NO: 2358 - RNA, 27 nt, synthetic construct
  misc_feature 1..27: note = Description of Artificial Sequence: Syntheticoligonucleotide
  source 1..27: mol_type = other RNA
gctcatcttttctttatgttttcgaat

SEQ ID NO: 2359 - RNA, 27 nt, synthetic construct
  misc_feature 1..27: note = Description of Artificial Sequence: Syntheticoligonucleotide
  source 1..27: mol_type = other RNA
tgctcatcttttctttatgttttcgaa

SEQ ID NO: 2360 - RNA, 27 nt, synthetic construct
  misc_feature 1..27: note = Description of Artificial Sequence: Syntheticoligonucleotide
  source 1..27: mol_type = other RNA
tctttttcttctttttaccatctttgc

SEQ ID NO: 2361 - RNA, 27 nt, synthetic construct
  misc_feature 1..27: note = Description of Artificial Sequence: Syntheticoligonucleotide
  source 1..27: mol_type = other RNA
ttctttttcttctttttaccatctttg

SEQ ID NO: 2362 - RNA, 27 nt, synthetic construct
  misc_feature 1..27: note = Description of Artificial Sequence: Syntheticoligonucleotide
  source 1..27: mol_type = other RNA
acttctttttcttctttttaccatctt

SEQ ID NO: 2363 - RNA, 27 nt, synthetic construct
  misc_feature 1..27: note = Description of Artificial Sequence: Syntheticoligonucleotide
  source 1..27: mol_type = other RNA
gacttctttttcttctttttaccatct

SEQ ID NO: 2364 - RNA, 27 nt, synthetic construct
  misc_feature 1..27: note = Description of Artificial Sequence: Syntheticoligonucleotide
  source 1..27: mol_type = other RNA
tctttgacttctttttcttctttttac

SEQ ID NO: 2365 - RNA, 27 nt, synthetic construct
  misc_feature 1..27: note = Description of Artificial Sequence: Syntheticoligonucleotide
  source 1..27: mol_type = other RNA
gtctttgacttctttttcttcttttta

SEQ ID NO: 2366 - RNA, 27 nt, synthetic construct
  misc_feature 1..27: note = Description of Artificial Sequence: Syntheticoligonucleotide
  source 1..27: mol_type = other RNA
tgtctttgacttctttttcttcttttt

SEQ ID NO: 2367 - RNA, 27 nt, synthetic construct
  misc_feature 1..27: note = Description of Artificial Sequence: Syntheticoligonucleotide
  source 1..27: mol_type = other RNA
acataattacacactttgtctttgact

SEQ ID NO: 2368 - RNA, 27 nt, synthetic construct
  misc_feature 1..27: note = Description of Artificial Sequence: Syntheticoligonucleotide
  source 1..27: mol_type = other RNA
tacataattacacactttgtctttgac

SEQ ID NO: 2369 - RNA, 27 nt, synthetic construct
  misc_feature 1..27: note = Description of Artificial Sequence: Syntheticoligonucleotide
  source 1..27: mol_type = other RNA
tatttacataattacacactttgtctt

SEQ ID NO: 2370 - RNA, 27 nt, synthetic construct
  misc_feature 1..27: note = Description of Artificial Sequence: Syntheticoligonucleotide
  source 1..27: mol_type = other RNA
tgtatttacataattacacactttgtc

SEQ ID NO: 2371 - RNA, 27 nt, synthetic construct
  misc_feature 1..27: note = Description of Artificial Sequence: Syntheticoligonucleotide
  source 1..27: mol_type = other RNA
aaattgtatttacataattacacactt

SEQ ID NO: 2372 - RNA, 27 nt, synthetic construct
  misc_feature 1..27: note = Description of Artificial Sequence: Syntheticoligonucleotide
  source 1..27: mol_type = other RNA
acaaattgtatttacataattacacac

SEQ ID NO: 2373 - RNA, 27 nt, synthetic construct
  misc_feature 1..27: note = Description of Artificial Sequence: Syntheticoligonucleotide
  source 1..27: mol_type = other RNA
gtacaaattgtatttacataattacac

SEQ ID NO: 2374 - RNA, 27 nt, synthetic construct
  misc_feature 1..27: note = Description of Artificial Sequence: Syntheticoligonucleotide
  source 1..27: mol_type = other RNA
agtacaaattgtatttacataattaca

SEQ ID NO: 2375 - RNA, 27 nt, synthetic construct
  misc_feature 1..27: note = Description of Artificial Sequence: Syntheticoligonucleotide
  source 1..27: mol_type = other RNA
aaaaagtacaaattgtatttacataat

SEQ ID NO: 2376 - RNA, 27 nt, synthetic construct
  misc_feature 1..27: note = Description of Artificial Sequence: Syntheticoligonucleotide
  source 1..27: mol_type = other RNA
aaaaaagtacaaattgtatttacataa

SEQ ID NO: 2377 - RNA, 27 nt, synthetic construct
  misc_feature 1..27: note = Description of Artificial Sequence: Syntheticoligonucleotide
  source 1..27: mol_type = other RNA
gaaaaaagtacaaattgtatttacata

SEQ ID NO: 2378 - RNA, 27 nt, synthetic construct
  misc_feature 1..27: note = Description of Artificial Sequence: Syntheticoligonucleotide
  source 1..27: mol_type = other RNA
agaaaaaagtacaaattgtatttacat

SEQ ID NO: 2379 - RNA, 27 nt, synthetic construct
  misc_feature 1..27: note = Description of Artificial Sequence: Syntheticoligonucleotide
  source 1..27: mol_type = other RNA
gccttaagaaaaaagtacaaattgtat

SEQ ID NO: 2380 - RNA, 27 nt, synthetic construct
  misc_feature 1..27: note = Description of Artificial Sequence: Syntheticoligonucleotide
  source 1..27: mol_type = other RNA
tgccttaagaaaaaagtacaaattgta

SEQ ID NO: 2381 - RNA, 27 nt, synthetic construct
  misc_feature 1..27: note = Description of Artificial Sequence: Syntheticoligonucleotide
  source 1..27: mol_type = other RNA
acaaaaattaccacttgtactagtatg

SEQ ID NO: 2382 - RNA, 27 nt, synthetic construct
  misc_feature 1..27: note = Description of Artificial Sequence: Syntheticoligonucleotide
  source 1..27: mol_type = other RNA
tacaaaaattaccacttgtactagtat

SEQ ID NO: 2383 - RNA, 27 nt, synthetic construct
  misc_feature 1..27: note = Description of Artificial Sequence: Syntheticoligonucleotide
  source 1..27: mol_type = other RNA
gtaatgtacaaaaattaccacttgtac

SEQ ID NO: 2384 - RNA, 27 nt, synthetic construct
  misc_feature 1..27: note = Description of Artificial Sequence: Syntheticoligonucleotide
  source 1..27: mol_type = other RNA
tgtaatgtacaaaaattaccacttgta

SEQ ID NO: 2385 - RNA, 27 nt, synthetic construct
  misc_feature 1..27: note = Description of Artificial Sequence: Syntheticoligonucleotide
  source 1..27: mol_type = other RNA
aatttagtgtaatgtacaaaaattacc

SEQ ID NO: 2386 - RNA, 27 nt, synthetic construct
  misc_feature 1..27: note = Description of Artificial Sequence: Syntheticoligonucleotide
  source 1..27: mol_type = other RNA
taatttagtgtaatgtacaaaaattac

SEQ ID NO: 2387 - RNA, 27 nt, synthetic construct
  misc_feature 1..27: note = Description of Artificial Sequence: Syntheticoligonucleotide
  source 1..27: mol_type = other RNA
ataatttagtgtaatgtacaaaaatta

SEQ ID NO: 2388 - RNA, 27 nt, synthetic construct
  misc_feature 1..27: note = Description of Artificial Sequence: Syntheticoligonucleotide
  source 1..27: mol_type = other RNA
aataatttagtgtaatgtacaaaaatt

SEQ ID NO: 2389 - RNA, 27 nt, synthetic construct
  misc_feature 1..27: note = Description of Artificial Sequence: Syntheticoligonucleotide
  source 1..27: mol_type = other RNA
taataatttagtgtaatgtacaaaaat

SEQ ID NO: 2390 - RNA, 27 nt, synthetic construct
  misc_feature 1..27: note = Description of Artificial Sequence: Syntheticoligonucleotide
  source 1..27: mol_type = other RNA
taaaacaaatgctaataatttagtgta

SEQ ID NO: 2391 - RNA, 27 nt, synthetic construct
  misc_feature 1..27: note = Description of Artificial Sequence: Syntheticoligonucleotide
  source 1..27: mol_type = other RNA
gctaaaacaaatgctaataatttagtg

SEQ ID NO: 2392 - RNA, 27 nt, synthetic construct
  misc_feature 1..27: note = Description of Artificial Sequence: Syntheticoligonucleotide
  source 1..27: mol_type = other RNA
tgctaaaacaaatgctaataatttagt

SEQ ID NO: 2393 - RNA, 27 nt, synthetic construct
  misc_feature 1..27: note = Description of Artificial Sequence: Syntheticoligonucleotide
  source 1..27: mol_type = other RNA
ggtaatgctaaaacaaatgctaataat

SEQ ID NO: 2394 - RNA, 27 nt, synthetic construct
  misc_feature 1..27: note = Description of Artificial Sequence: Syntheticoligonucleotide
  source 1..27: mol_type = other RNA
aaattaggtaatgctaaaacaaatgct

SEQ ID NO: 2395 - RNA, 27 nt, synthetic construct
  misc_feature 1..27: note = Description of Artificial Sequence: Syntheticoligonucleotide
  source 1..27: mol_type = other RNA
aaaattaggtaatgctaaaacaaatgc

SEQ ID NO: 2396 - RNA, 27 nt, synthetic construct
  misc_feature 1..27: note = Description of Artificial Sequence: Syntheticoligonucleotide
  source 1..27: mol_type = other RNA
aaaaaattaggtaatgctaaaacaaat

SEQ ID NO: 2397 - RNA, 27 nt, synthetic construct
  misc_feature 1..27: note = Description of Artificial Sequence: Syntheticoligonucleotide
  source 1..27: mol_type = other RNA
aaaaaaattaggtaatgctaaaacaaa

SEQ ID NO: 2398 - RNA, 27 nt, synthetic construct
  misc_feature 1..27: note = Description of Artificial Sequence: Syntheticoligonucleotide
  source 1..27: mol_type = other RNA
gaaaaaaattaggtaatgctaaaacaa

SEQ ID NO: 2399 - RNA, 27 nt, synthetic construct
  misc_feature 1..27: note = Description of Artificial Sequence: Syntheticoligonucleotide
  source 1..27: mol_type = other RNA
ggaaaaaaattaggtaatgctaaaaca

SEQ ID NO: 2400 - RNA, 27 nt, synthetic construct
  misc_feature 1..27: note = Description of Artificial Sequence: Syntheticoligonucleotide
  source 1..27: mol_type = other RNA
gcatttaaggtaaaagctaacagtctg

SEQ ID NO: 2401 - RNA, 27 nt, synthetic construct
  misc_feature 1..27: note = Description of Artificial Sequence: Syntheticoligonucleotide
  source 1..27: mol_type = other RNA
agcatttaaggtaaaagctaacagtct

SEQ ID NO: 2402 - RNA, 27 nt, synthetic construct
  misc_feature 1..27: note = Description of Artificial Sequence: Syntheticoligonucleotide
  source 1..27: mol_type = other RNA
aaaataagcatttaaggtaaaagctaa

SEQ ID NO: 2403 - RNA, 27 nt, synthetic construct
  misc_feature 1..27: note = Description of Artificial Sequence: Syntheticoligonucleotide
  source 1..27: mol_type = other RNA
taaaataagcatttaaggtaaaagcta

SEQ ID NO: 2404 - RNA, 27 nt, synthetic construct
  misc_feature 1..27: note = Description of Artificial Sequence: Syntheticoligonucleotide
  source 1..27: mol_type = other RNA
ttaaaataagcatttaaggtaaaagct

SEQ ID NO: 2405 - RNA, 27 nt, synthetic construct
  misc_feature 1..27: note = Description of Artificial Sequence: Syntheticoligonucleotide
  source 1..27: mol_type = other RNA
gtcattttaaaataagcatttaaggta

SEQ ID NO: 2406 - RNA, 27 nt, synthetic construct
  misc_feature 1..27: note = Description of Artificial Sequence: Syntheticoligonucleotide
  source 1..27: mol_type = other RNA
tgtcattttaaaataagcatttaaggt

SEQ ID NO: 2407 - RNA, 27 nt, synthetic construct
  misc_feature 1..27: note = Description of Artificial Sequence: Syntheticoligonucleotide
  source 1..27: mol_type = other RNA
ttccactgtcattttaaaataagcatt

SEQ ID NO: 2408 - RNA, 27 nt, synthetic construct
  misc_feature 1..27: note = Description of Artificial Sequence: Syntheticoligonucleotide
  source 1..27: mol_type = other RNA
acttccactgtcattttaaaataagca

SEQ ID NO: 2409 - RNA, 27 nt, synthetic construct
  misc_feature 1..27: note = Description of Artificial Sequence: Syntheticoligonucleotide
  source 1..27: mol_type = other RNA
acttagaggaaaaaaaaacttccactg

SEQ ID NO: 2410 - RNA, 27 nt, synthetic construct
  misc_feature 1..27: note = Description of Artificial Sequence: Syntheticoligonucleotide
  source 1..27: mol_type = other RNA
gcacttagaggaaaaaaaaacttccac

SEQ ID NO: 2411 - RNA, 27 nt, synthetic construct
  misc_feature 1..27: note = Description of Artificial Sequence: Syntheticoligonucleotide
  source 1..27: mol_type = other RNA
ggcacttagaggaaaaaaaaacttcca

SEQ ID NO: 2412 - RNA, 27 nt, synthetic construct
  misc_feature 1..27: note = Description of Artificial Sequence: Syntheticoligonucleotide
  source 1..27: mol_type = other RNA
ggcattgctagttcaaaaaccaaaact

SEQ ID NO: 2413 - RNA, 27 nt, synthetic construct
  misc_feature 1..27: note = Description of Artificial Sequence: Syntheticoligonucleotide
  source 1..27: mol_type = other RNA
ggtattcagtttctttttcacaggcat

SEQ ID NO: 2414 - RNA, 27 nt, synthetic construct
  misc_feature 1..27: note = Description of Artificial Sequence: Syntheticoligonucleotide
  source 1..27: mol_type = other RNA
aatcttaggtattcagtttctttttca

SEQ ID NO: 2415 - RNA, 27 nt, synthetic construct
  misc_feature 1..27: note = Description of Artificial Sequence: Syntheticoligonucleotide
  source 1..27: mol_type = other RNA
aaatcttaggtattcagtttctttttc

SEQ ID NO: 2416 - RNA, 27 nt, synthetic construct
  misc_feature 1..27: note = Description of Artificial Sequence: Syntheticoligonucleotide
  source 1..27: mol_type = other RNA
agacagaaatcttaggtattcagtttc

SEQ ID NO: 2417 - RNA, 27 nt, synthetic construct
  misc_feature 1..27: note = Description of Artificial Sequence: Syntheticoligonucleotide
  source 1..27: mol_type = other RNA
gaaaaataagaagtaatcaactgcatg

SEQ ID NO: 2418 - RNA, 27 nt, synthetic construct
  misc_feature 1..27: note = Description of Artificial Sequence: Syntheticoligonucleotide
  source 1..27: mol_type = other RNA
agaaaaataagaagtaatcaactgcat

SEQ ID NO: 2419 - RNA, 27 nt, synthetic construct
  misc_feature 1..27: note = Description of Artificial Sequence: Syntheticoligonucleotide
  source 1..27: mol_type = other RNA
ggtaagaaaaataagaagtaatcaact

SEQ ID NO: 2420 - RNA, 27 nt, synthetic construct
  misc_feature 1..27: note = Description of Artificial Sequence: Syntheticoligonucleotide
  source 1..27: mol_type = other RNA
tcacaattggtaagaaaaataagaagt

SEQ ID NO: 2421 - RNA, 27 nt, synthetic construct
  misc_feature 1..27: note = Description of Artificial Sequence: Syntheticoligonucleotide
  source 1..27: mol_type = other RNA
ttcacaattggtaagaaaaataagaag

SEQ ID NO: 2422 - RNA, 27 nt, synthetic construct
  misc_feature 1..27: note = Description of Artificial Sequence: Syntheticoligonucleotide
  source 1..27: mol_type = other RNA
attcacaattggtaagaaaaataagaa

SEQ ID NO: 2423 - RNA, 27 nt, synthetic construct
  misc_feature 1..27: note = Description of Artificial Sequence: Syntheticoligonucleotide
  source 1..27: mol_type = other RNA
tcattaatttgtttcacaccaacattc

SEQ ID NO: 2424 - RNA, 27 nt, synthetic construct
  misc_feature 1..27: note = Description of Artificial Sequence: Syntheticoligonucleotide
  source 1..27: mol_type = other RNA
gcttcattaatttgtttcacaccaaca

SEQ ID NO: 2425 - RNA, 27 nt, synthetic construct
  misc_feature 1..27: note = Description of Artificial Sequence: Syntheticoligonucleotide
  source 1..27: mol_type = other RNA
agcttcattaatttgtttcacaccaac

SEQ ID NO: 2426 - RNA, 27 nt, synthetic construct
  misc_feature 1..27: note = Description of Artificial Sequence: Syntheticoligonucleotide
  source 1..27: mol_type = other RNA
gattcaaaagcttcattaatttgtttc

SEQ ID NO: 2427 - RNA, 27 nt, synthetic construct
  misc_feature 1..27: note = Description of Artificial Sequence: Syntheticoligonucleotide
  source 1..27: mol_type = other RNA
tgattcaaaagcttcattaatttgttt

SEQ ID NO: 2428 - RNA, 27 nt, synthetic construct
  misc_feature 1..27: note = Description of Artificial Sequence: Syntheticoligonucleotide
  source 1..27: mol_type = other RNA
tttatgtgactagataaaacacagaat

SEQ ID NO: 2429 - RNA, 27 nt, synthetic construct
  misc_feature 1..27: note = Description of Artificial Sequence: Syntheticoligonucleotide
  source 1..27: mol_type = other RNA
atttatgtgactagataaaacacagaa

SEQ ID NO: 2430 - RNA, 27 nt, synthetic construct
  misc_feature 1..27: note = Description of Artificial Sequence: Syntheticoligonucleotide
  source 1..27: mol_type = other RNA
tccatttatgtgactagataaaacaca

SEQ ID NO: 2431 - RNA, 27 nt, synthetic construct
  misc_feature 1..27: note = Description of Artificial Sequence: Syntheticoligonucleotide
  source 1..27: mol_type = other RNA
atccatttatgtgactagataaaacac

SEQ ID NO: 2432 - RNA, 27 nt, synthetic construct
  misc_feature 1..27: note = Description of Artificial Sequence: Syntheticoligonucleotide
  source 1..27: mol_type = other RNA
aattaatccatttatgtgactagataa

SEQ ID NO: 2433 - RNA, 27 nt, synthetic construct
  misc_feature 1..27: note = Description of Artificial Sequence: Syntheticoligonucleotide
  source 1..27: mol_type = other RNA
taattaatccatttatgtgactagata

SEQ ID NO: 2434 - RNA, 27 nt, synthetic construct
  misc_feature 1..27: note = Description of Artificial Sequence: Syntheticoligonucleotide
  source 1..27: mol_type = other RNA
gaaattagtaattaatccatttatgtg

SEQ ID NO: 2435 - RNA, 27 nt, synthetic construct
  misc_feature 1..27: note = Description of Artificial Sequence: Syntheticoligonucleotide
  source 1..27: mol_type = other RNA
tgaaattagtaattaatccatttatgt

SEQ ID NO: 2436 - RNA, 27 nt, synthetic construct
  misc_feature 1..27: note = Description of Artificial Sequence: Syntheticoligonucleotide
  source 1..27: mol_type = other RNA
tcaactgaaattagtaattaatccatt

SEQ ID NO: 2437 - RNA, 27 nt, synthetic construct
  misc_feature 1..27: note = Description of Artificial Sequence: Syntheticoligonucleotide
  source 1..27: mol_type = other RNA
tctcaactgaaattagtaattaatcca

SEQ ID NO: 2438 - RNA, 27 nt, synthetic construct
  misc_feature 1..27: note = Description of Artificial Sequence: Syntheticoligonucleotide
  source 1..27: mol_type = other RNA
gtctcaactgaaattagtaattaatcc

SEQ ID NO: 2439 - RNA, 27 nt, synthetic construct
  misc_feature 1..27: note = Description of Artificial Sequence: Syntheticoligonucleotide
  source 1..27: mol_type = other RNA
ggtctcaactgaaattagtaattaatc

SEQ ID NO: 2440 - RNA, 27 nt, synthetic construct
  misc_feature 1..27: note = Description of Artificial Sequence: Syntheticoligonucleotide
  source 1..27: mol_type = other RNA
tcaatgtttcagtaaaaaccaattaga

SEQ ID NO: 2441 - RNA, 27 nt, synthetic construct
  misc_feature 1..27: note = Description of Artificial Sequence: Syntheticoligonucleotide
  source 1..27: mol_type = other RNA
tccctcaatgtttcagtaaaaaccaat

SEQ ID NO: 2442 - RNA, 27 nt, synthetic construct
  misc_feature 1..27: note = Description of Artificial Sequence: Syntheticoligonucleotide
  source 1..27: mol_type = other RNA
ttccctcaatgtttcagtaaaaaccaa

SEQ ID NO: 2443 - RNA, 27 nt, synthetic construct
  misc_feature 1..27: note = Description of Artificial Sequence: Syntheticoligonucleotide
  source 1..27: mol_type = other RNA
gcccataaatttgtgttccctcaatgt

SEQ ID NO: 2444 - RNA, 27 nt, synthetic construct
  misc_feature 1..27: note = Description of Artificial Sequence: Syntheticoligonucleotide
  source 1..27: mol_type = other RNA
agcccataaatttgtgttccctcaatg

SEQ ID NO: 2445 - RNA, 27 nt, synthetic construct
  misc_feature 1..27: note = Description of Artificial Sequence: Syntheticoligonucleotide
  source 1..27: mol_type = other RNA
gaacagtgtaactttacattcatcagg

SEQ ID NO: 2446 - RNA, 27 nt, synthetic construct
  misc_feature 1..27: note = Description of Artificial Sequence: Syntheticoligonucleotide
  source 1..27: mol_type = other RNA
tgaacagtgtaactttacattcatcag

SEQ ID NO: 2447 - RNA, 27 nt, synthetic construct
  misc_feature 1..27: note = Description of Artificial Sequence: Syntheticoligonucleotide
  source 1..27: mol_type = other RNA
ttatagaaaaaatataatattttgggg

SEQ ID NO: 2448 - RNA, 27 nt, synthetic construct
  misc_feature 1..27: note = Description of Artificial Sequence: Syntheticoligonucleotide
  source 1..27: mol_type = other RNA
tttatagaaaaaatataatattttggg

SEQ ID NO: 2449 - RNA, 27 nt, synthetic construct
  misc_feature 1..27: note = Description of Artificial Sequence: Syntheticoligonucleotide
  source 1..27: mol_type = other RNA
ttttatagaaaaaatataatattttgg

SEQ ID NO: 2450 - RNA, 27 nt, synthetic construct
  misc_feature 1..27: note = Description of Artificial Sequence: Syntheticoligonucleotide
  source 1..27: mol_type = other RNA
tttttatagaaaaaatataatattttg

SEQ ID NO: 2451 - RNA, 27 nt, synthetic construct
  misc_feature 1..27: note = Description of Artificial Sequence: Syntheticoligonucleotide
  source 1..27: mol_type = other RNA
tctttttatagaaaaaatataatattt

SEQ ID NO: 2452 - RNA, 27 nt, synthetic construct
  misc_feature 1..27: note = Description of Artificial Sequence: Syntheticoligonucleotide
  source 1..27: mol_type = other RNA
ttctttttatagaaaaaatataatatt

SEQ ID NO: 2453 - RNA, 27 nt, synthetic construct
  misc_feature 1..27: note = Description of Artificial Sequence: Syntheticoligonucleotide
  source 1..27: mol_type = other RNA
tttctttttatagaaaaaatataatat

SEQ ID NO: 2454 - RNA, 27 nt, synthetic construct
  misc_feature 1..27: note = Description of Artificial Sequence: Syntheticoligonucleotide
  source 1..27: mol_type = other RNA
ttttctttttatagaaaaaatataata

SEQ ID NO: 2455 - RNA, 27 nt, synthetic construct
  misc_feature 1..27: note = Description of Artificial Sequence: Syntheticoligonucleotide
  source 1..27: mol_type = other RNA
tttttctttttatagaaaaaatataat

SEQ ID NO: 2456 - RNA, 27 nt, synthetic construct
  misc_feature 1..27: note = Description of Artificial Sequence: Syntheticoligonucleotide
  source 1..27: mol_type = other RNA
ttttttctttttatagaaaaaatataa

SEQ ID NO: 2457 - RNA, 27 nt, synthetic construct
  misc_feature 1..27: note = Description of Artificial Sequence: Syntheticoligonucleotide
  source 1..27: mol_type = other RNA
tttttttctttttatagaaaaaatata

SEQ ID NO: 2458 - RNA, 27 nt, synthetic construct
  misc_feature 1..27: note = Description of Artificial Sequence: Syntheticoligonucleotide
  source 1..27: mol_type = other RNA
atttttttctttttatagaaaaaatat

SEQ ID NO: 2459 - RNA, 27 nt, synthetic construct
  misc_feature 1..27: note = Description of Artificial Sequence: Syntheticoligonucleotide
  source 1..27: mol_type = other RNA
tttccatttttttctttttatagaaaa

SEQ ID NO: 2460 - RNA, 27 nt, synthetic construct
  misc_feature 1..27: note = Description of Artificial Sequence: Syntheticoligonucleotide
  source 1..27: mol_type = other RNA
ttttccatttttttctttttatagaaa

SEQ ID NO: 2461 - RNA, 27 nt, synthetic construct
  misc_feature 1..27: note = Description of Artificial Sequence: Syntheticoligonucleotide
  source 1..27: mol_type = other RNA
ttttttccatttttttctttttataga

SEQ ID NO: 2462 - RNA, 27 nt, synthetic construct
  misc_feature 1..27: note = Description of Artificial Sequence: Syntheticoligonucleotide
  source 1..27: mol_type = other RNA
tttttttccatttttttctttttatag

SEQ ID NO: 2463 - RNA, 27 nt, synthetic construct
  misc_feature 1..27: note = Description of Artificial Sequence: Syntheticoligonucleotide
  source 1..27: mol_type = other RNA
atttttttccatttttttctttttata

SEQ ID NO: 2464 - RNA, 27 nt, synthetic construct
  misc_feature 1..27: note = Description of Artificial Sequence: Syntheticoligonucleotide
  source 1..27: mol_type = other RNA
aatttttttccatttttttctttttat

SEQ ID NO: 2465 - RNA, 27 nt, synthetic construct
  misc_feature 1..27: note = Description of Artificial Sequence: Syntheticoligonucleotide
  source 1..27: mol_type = other RNA
taatttttttccatttttttcttttta

SEQ ID NO: 2466 - RNA, 27 nt, synthetic construct
  misc_feature 1..27: note = Description of Artificial Sequence: Syntheticoligonucleotide
  source 1..27: mol_type = other RNA
gtaatttttttccatttttttcttttt

SEQ ID NO: 2467 - RNA, 27 nt, synthetic construct
  misc_feature 1..27: note = Description of Artificial Sequence: Syntheticoligonucleotide
  source 1..27: mol_type = other RNA
tgtaatttttttccatttttttctttt

SEQ ID NO: 2468 - RNA, 27 nt, synthetic construct
  misc_feature 1..27: note = Description of Artificial Sequence: Syntheticoligonucleotide
  source 1..27: mol_type = other RNA
gccttgtaatttttttccatttttttc

SEQ ID NO: 2469 - RNA, 27 nt, synthetic construct
  misc_feature 1..27: note = Description of Artificial Sequence: Syntheticoligonucleotide
  source 1..27: mol_type = other RNA
tgccttgtaatttttttccattttttt

SEQ ID NO: 2470 - RNA, 27 nt, synthetic construct
  misc_feature 1..27: note = Description of Artificial Sequence: Syntheticoligonucleotide
  source 1..27: mol_type = other RNA
tccattgccttgtaatttttttccatt

SEQ ID NO: 2471 - RNA, 27 nt, synthetic construct
  misc_feature 1..27: note = Description of Artificial Sequence: Syntheticoligonucleotide
  source 1..27: mol_type = other RNA
ttccattgccttgtaatttttttccat

SEQ ID NO: 2472 - RNA, 27 nt, synthetic construct
  misc_feature 1..27: note = Description of Artificial Sequence: Syntheticoligonucleotide
  source 1..27: mol_type = other RNA
tttccattgccttgtaatttttttcca

SEQ ID NO: 2473 - RNA, 27 nt, synthetic construct
  misc_feature 1..27: note = Description of Artificial Sequence: Syntheticoligonucleotide
  source 1..27: mol_type = other RNA
ttatctaatgtgaaaaggaaatggcct

SEQ ID NO: 2474 - RNA, 27 nt, synthetic construct
  misc_feature 1..27: note = Description of Artificial Sequence: Syntheticoligonucleotide
  source 1..27: mol_type = other RNA
agtaatttatctaatgtgaaaaggaaa

SEQ ID NO: 2475 - RNA, 27 nt, synthetic construct
  misc_feature 1..27: note = Description of Artificial Sequence: Syntheticoligonucleotide
  source 1..27: mol_type = other RNA
tctttatagtaatttatctaatgtgaa

SEQ ID NO: 2476 - RNA, 27 nt, synthetic construct
  misc_feature 1..27: note = Description of Artificial Sequence: Syntheticoligonucleotide
  source 1..27: mol_type = other RNA
gtctttatagtaatttatctaatgtga

SEQ ID NO: 2477 - RNA, 27 nt, synthetic construct
  misc_feature 1..27: note = Description of Artificial Sequence: Syntheticoligonucleotide
  source 1..27: mol_type = other RNA
agtctttatagtaatttatctaatgtg

SEQ ID NO: 2478 - RNA, 27 nt, synthetic construct
  misc_feature 1..27: note = Description of Artificial Sequence: Syntheticoligonucleotide
  source 1..27: mol_type = other RNA
gctataataatccccatttcatactgg

SEQ ID NO: 2479 - RNA, 27 nt, synthetic construct
  misc_feature 1..27: note = Description of Artificial Sequence: Syntheticoligonucleotide
  source 1..27: mol_type = other RNA
aaaatggttgctataataatccccatt

SEQ ID NO: 2480 - RNA, 27 nt, synthetic construct
  misc_feature 1..27: note = Description of Artificial Sequence: Syntheticoligonucleotide
  source 1..27: mol_type = other RNA
aatttagtagcatgtaaatatagcccc

SEQ ID NO: 2481 - RNA, 27 nt, synthetic construct
  misc_feature 1..27: note = Description of Artificial Sequence: Syntheticoligonucleotide
  source 1..27: mol_type = other RNA
aaatttagtagcatgtaaatatagccc

SEQ ID NO: 2482 - RNA, 27 nt, synthetic construct
  misc_feature 1..27: note = Description of Artificial Sequence: Syntheticoligonucleotide
  source 1..27: mol_type = other RNA
aaaatttagtagcatgtaaatatagcc

SEQ ID NO: 2483 - RNA, 27 nt, synthetic construct
  misc_feature 1..27: note = Description of Artificial Sequence: Syntheticoligonucleotide
  source 1..27: mol_type = other RNA
aaaaatttagtagcatgtaaatatagc

SEQ ID NO: 2484 - RNA, 27 nt, synthetic construct
  misc_feature 1..27: note = Description of Artificial Sequence: Syntheticoligonucleotide
  source 1..27: mol_type = other RNA
taaaaatttagtagcatgtaaatatag

SEQ ID NO: 2485 - RNA, 27 nt, synthetic construct
  misc_feature 1..27: note = Description of Artificial Sequence: Syntheticoligonucleotide
  source 1..27: mol_type = other RNA
tattataaaaatttagtagcatgtaaa

SEQ ID NO: 2486 - RNA, 27 nt, synthetic construct
  misc_feature 1..27: note = Description of Artificial Sequence: Syntheticoligonucleotide
  source 1..27: mol_type = other RNA
tttcaattattataaaaatttagtagc

SEQ ID NO: 2487 - RNA, 27 nt, synthetic construct
  misc_feature 1..27: note = Description of Artificial Sequence: Syntheticoligonucleotide
  source 1..27: mol_type = other RNA
ttttcaattattataaaaatttagtag

SEQ ID NO: 2488 - RNA, 27 nt, synthetic construct
  misc_feature 1..27: note = Description of Artificial Sequence: Syntheticoligonucleotide
  source 1..27: mol_type = other RNA
tcttttcaattattataaaaatttagt

SEQ ID NO: 2489 - RNA, 27 nt, synthetic construct
  misc_feature 1..27: note = Description of Artificial Sequence: Syntheticoligonucleotide
  source 1..27: mol_type = other RNA
atcttttcaattattataaaaatttag

SEQ ID NO: 2490 - RNA, 27 nt, synthetic construct
  misc_feature 1..27: note = Description of Artificial Sequence: Syntheticoligonucleotide
  source 1..27: mol_type = other RNA
aatcttttcaattattataaaaattta

SEQ ID NO: 2491 - RNA, 27 nt, synthetic construct
  misc_feature 1..27: note = Description of Artificial Sequence: Syntheticoligonucleotide
  source 1..27: mol_type = other RNA
aaatcttttcaattattataaaaattt

SEQ ID NO: 2492 - RNA, 27 nt, synthetic construct
  misc_feature 1..27: note = Description of Artificial Sequence: Syntheticoligonucleotide
  source 1..27: mol_type = other RNA
aaaatcttttcaattattataaaaatt

SEQ ID NO: 2493 - RNA, 27 nt, synthetic construct
  misc_feature 1..27: note = Description of Artificial Sequence: Syntheticoligonucleotide
  source 1..27: mol_type = other RNA
taaaatcttttcaattattataaaaat

SEQ ID NO: 2494 - RNA, 27 nt, synthetic construct
  misc_feature 1..27: note = Description of Artificial Sequence: Syntheticoligonucleotide
  source 1..27: mol_type = other RNA
ttaaaatcttttcaattattataaaaa

SEQ ID NO: 2495 - RNA, 27 nt, synthetic construct
  misc_feature 1..27: note = Description of Artificial Sequence: Syntheticoligonucleotide
  source 1..27: mol_type = other RNA
gttaaaatcttttcaattattataaaa

SEQ ID NO: 2496 - RNA, 27 nt, synthetic construct
  misc_feature 1..27: note = Description of Artificial Sequence: Syntheticoligonucleotide
  source 1..27: mol_type = other RNA
tgttaaaatcttttcaattattataaa

SEQ ID NO: 2497 - RNA, 27 nt, synthetic construct
  misc_feature 1..27: note = Description of Artificial Sequence: Syntheticoligonucleotide
  source 1..27: mol_type = other RNA
tacttgttaaaatcttttcaattatta

SEQ ID NO: 2498 - RNA, 27 nt, synthetic construct
  misc_feature 1..27: note = Description of Artificial Sequence: Syntheticoligonucleotide
  source 1..27: mol_type = other RNA
atacttgttaaaatcttttcaattatt

SEQ ID NO: 2499 - RNA, 27 nt, synthetic construct
  misc_feature 1..27: note = Description of Artificial Sequence: Syntheticoligonucleotide
  source 1..27: mol_type = other RNA
ttatacttgttaaaatcttttcaatta

SEQ ID NO: 2500 - RNA, 27 nt, synthetic construct
  misc_feature 1..27: note = Description of Artificial Sequence: Syntheticoligonucleotide
  source 1..27: mol_type = other RNA
tttatacttgttaaaatcttttcaatt

SEQ ID NO: 2501 - RNA, 27 nt, synthetic construct
  misc_feature 1..27: note = Description of Artificial Sequence: Syntheticoligonucleotide
  source 1..27: mol_type = other RNA
ttttatacttgttaaaatcttttcaat

SEQ ID NO: 2502 - RNA, 27 nt, synthetic construct
  misc_feature 1..27: note = Description of Artificial Sequence: Syntheticoligonucleotide
  source 1..27: mol_type = other RNA
tttttatacttgttaaaatcttttcaa

SEQ ID NO: 2503 - RNA, 27 nt, synthetic construct
  misc_feature 1..27: note = Description of Artificial Sequence: Syntheticoligonucleotide
  source 1..27: mol_type = other RNA
ttttttatacttgttaaaatcttttca

SEQ ID NO: 2504 - RNA, 27 nt, synthetic construct
  misc_feature 1..27: note = Description of Artificial Sequence: Syntheticoligonucleotide
  source 1..27: mol_type = other RNA
attttttatacttgttaaaatcttttc

SEQ ID NO: 2505 - RNA, 27 nt, synthetic construct
  misc_feature 1..27: note = Description of Artificial Sequence: Syntheticoligonucleotide
  source 1..27: mol_type = other RNA
aattttttatacttgttaaaatctttt

SEQ ID NO: 2506 - RNA, 27 nt, synthetic construct
  misc_feature 1..27: note = Description of Artificial Sequence: Syntheticoligonucleotide
  source 1..27: mol_type = other RNA
gaattttttatacttgttaaaatcttt

SEQ ID NO: 2507 - RNA, 27 nt, synthetic construct
  misc_feature 1..27: note = Description of Artificial Sequence: Syntheticoligonucleotide
  source 1..27: mol_type = other RNA
agaattttttatacttgttaaaatctt

SEQ ID NO: 2508 - RNA, 27 nt, synthetic construct
  misc_feature 1..27: note = Description of Artificial Sequence: Syntheticoligonucleotide
  source 1..27: mol_type = other RNA
tcctatgagaattttttatacttgtta

SEQ ID NO: 2509 - RNA, 27 nt, synthetic construct
  misc_feature 1..27: note = Description of Artificial Sequence: Syntheticoligonucleotide
  source 1..27: mol_type = other RNA
ttcctatgagaattttttatacttgtt

SEQ ID NO: 2510 - RNA, 27 nt, synthetic construct
  misc_feature 1..27: note = Description of Artificial Sequence: Syntheticoligonucleotide
  source 1..27: mol_type = other RNA
attcctatgagaattttttatacttgt

SEQ ID NO: 2511 - RNA, 27 nt, synthetic construct
  misc_feature 1..27: note = Description of Artificial Sequence: Syntheticoligonucleotide
  source 1..27: mol_type = other RNA
aattcctatgagaattttttatacttg

SEQ ID NO: 2512 - RNA, 27 nt, synthetic construct
  misc_feature 1..27: note = Description of Artificial Sequence: Syntheticoligonucleotide
  source 1..27: mol_type = other RNA
taattcctatgagaattttttatactt

SEQ ID NO: 2513 - RNA, 27 nt, synthetic construct
  misc_feature 1..27: note = Description of Artificial Sequence: Syntheticoligonucleotide
  source 1..27: mol_type = other RNA
ttaattcctatgagaattttttatact

SEQ ID NO: 2514 - RNA, 27 nt, synthetic construct
  misc_feature 1..27: note = Description of Artificial Sequence: Syntheticoligonucleotide
  source 1..27: mol_type = other RNA
tttaattcctatgagaattttttatac

SEQ ID NO: 2515 - RNA, 27 nt, synthetic construct
  misc_feature 1..27: note = Description of Artificial Sequence: Syntheticoligonucleotide
  source 1..27: mol_type = other RNA
atttaattcctatgagaattttttata

SEQ ID NO: 2516 - RNA, 27 nt, synthetic construct
  misc_feature 1..27: note = Description of Artificial Sequence: Syntheticoligonucleotide
  source 1..27: mol_type = other RNA
acatttaattcctatgagaatttttta

SEQ ID NO: 2517 - RNA, 27 nt, synthetic construct
  misc_feature 1..27: note = Description of Artificial Sequence: Syntheticoligonucleotide
  source 1..27: mol_type = other RNA
tacatttaattcctatgagaatttttt

SEQ ID NO: 2518 - RNA, 27 nt, synthetic construct
  misc_feature 1..27: note = Description of Artificial Sequence: Syntheticoligonucleotide
  source 1..27: mol_type = other RNA
gatttaaagttatactatgaaagagca

SEQ ID NO: 2519 - RNA, 27 nt, synthetic construct
  misc_feature 1..27: note = Description of Artificial Sequence: Syntheticoligonucleotide
  source 1..27: mol_type = other RNA
gaaaagatttaaagttatactatgaaa

SEQ ID NO: 2520 - RNA, 27 nt, synthetic construct
  misc_feature 1..27: note = Description of Artificial Sequence: Syntheticoligonucleotide
  source 1..27: mol_type = other RNA
agaaaagatttaaagttatactatgaa

SEQ ID NO: 2521 - RNA, 27 nt, synthetic construct
  misc_feature 1..27: note = Description of Artificial Sequence: Syntheticoligonucleotide
  source 1..27: mol_type = other RNA
actcaagttgaagaaaagatttaaagt

SEQ ID NO: 2522 - RNA, 27 nt, synthetic construct
  misc_feature 1..27: note = Description of Artificial Sequence: Syntheticoligonucleotide
  source 1..27: mol_type = other RNA
gactcaagttgaagaaaagatttaaag

SEQ ID NO: 2523 - RNA, 27 nt, synthetic construct
  misc_feature 1..27: note = Description of Artificial Sequence: Syntheticoligonucleotide
  source 1..27: mol_type = other RNA
aaaactatcttcaaagactcaagttga

SEQ ID NO: 2524 - RNA, 27 nt, synthetic construct
  misc_feature 1..27: note = Description of Artificial Sequence: Syntheticoligonucleotide
  source 1..27: mol_type = other RNA
ttaaaactatcttcaaagactcaagtt

SEQ ID NO: 2525 - RNA, 27 nt, synthetic construct
  misc_feature 1..27: note = Description of Artificial Sequence: Syntheticoligonucleotide
  source 1..27: mol_type = other RNA
attaaaactatcttcaaagactcaagt

SEQ ID NO: 2526 - RNA, 27 nt, synthetic construct
  misc_feature 1..27: note = Description of Artificial Sequence: Syntheticoligonucleotide
  source 1..27: mol_type = other RNA
tcacaagcagaattaaaactatcttca

SEQ ID NO: 2527 - RNA, 27 nt, synthetic construct
  misc_feature 1..27: note = Description of Artificial Sequence: Syntheticoligonucleotide
  source 1..27: mol_type = other RNA
gtcacaagcagaattaaaactatcttc

SEQ ID NO: 2528 - RNA, 27 nt, synthetic construct
  misc_feature 1..27: note = Description of Artificial Sequence: Syntheticoligonucleotide
  source 1..27: mol_type = other RNA
tgtcacaagcagaattaaaactatctt

SEQ ID NO: 2529 - RNA, 27 nt, synthetic construct
  misc_feature 1..27: note = Description of Artificial Sequence: Syntheticoligonucleotide
  source 1..27: mol_type = other RNA
aaataatcttttaatgtcacaagcaga

SEQ ID NO: 2530 - RNA, 27 nt, synthetic construct
  misc_feature 1..27: note = Description of Artificial Sequence: Syntheticoligonucleotide
  source 1..27: mol_type = other RNA
tttcttaagaaacaaaagcaatgctct

SEQ ID NO: 2531 - RNA, 27 nt, synthetic construct
  misc_feature 1..27: note = Description of Artificial Sequence: Syntheticoligonucleotide
  source 1..27: mol_type = other RNA
ttttcttaagaaacaaaagcaatgctc

SEQ ID NO: 2532 - RNA, 27 nt, synthetic construct
  misc_feature 1..27: note = Description of Artificial Sequence: Syntheticoligonucleotide
  source 1..27: mol_type = other RNA
agtttgttttcttaagaaacaaaagca

SEQ ID NO: 2533 - RNA, 27 nt, synthetic construct
  misc_feature 1..27: note = Description of Artificial Sequence: Syntheticoligonucleotide
  source 1..27: mol_type = other RNA
aaaaaagagtttgttttcttaagaaac

SEQ ID NO: 2534 - RNA, 27 nt, synthetic construct
  misc_feature 1..27: note = Description of Artificial Sequence: Syntheticoligonucleotide
  source 1..27: mol_type = other RNA
taaaaaagagtttgttttcttaagaaa

SEQ ID NO: 2535 - RNA, 27 nt, synthetic construct
  misc_feature 1..27: note = Description of Artificial Sequence: Syntheticoligonucleotide
  source 1..27: mol_type = other RNA
ttaaaaaagagtttgttttcttaagaa

SEQ ID NO: 2536 - RNA, 27 nt, synthetic construct
  misc_feature 1..27: note = Description of Artificial Sequence: Syntheticoligonucleotide
  source 1..27: mol_type = other RNA
tttaaaaaagagtttgttttcttaaga

SEQ ID NO: 2537 - RNA, 27 nt, synthetic construct
  misc_feature 1..27: note = Description of Artificial Sequence: Syntheticoligonucleotide
  source 1..27: mol_type = other RNA
ttttaaaaaagagtttgttttcttaag

SEQ ID NO: 2538 - RNA, 27 nt, synthetic construct
  misc_feature 1..27: note = Description of Artificial Sequence: Syntheticoligonucleotide
  source 1..27: mol_type = other RNA
tttttaaaaaagagtttgttttcttaa

SEQ ID NO: 2539 - RNA, 27 nt, synthetic construct
  misc_feature 1..27: note = Description of Artificial Sequence: Syntheticoligonucleotide
  source 1..27: mol_type = other RNA
atttttaaaaaagagtttgttttctta

SEQ ID NO: 2540 - RNA, 27 nt, synthetic construct
  misc_feature 1..27: note = Description of Artificial Sequence: Syntheticoligonucleotide
  source 1..27: mol_type = other RNA
agtaatttttaaaaaagagtttgtttt

SEQ ID NO: 2541 - RNA, 27 nt, synthetic construct
  misc_feature 1..27: note = Description of Artificial Sequence: Syntheticoligonucleotide
  source 1..27: mol_type = other RNA
tttaaaagtaatttttaaaaaagagtt

SEQ ID NO: 2542 - RNA, 27 nt, synthetic construct
  misc_feature 1..27: note = Description of Artificial Sequence: Syntheticoligonucleotide
  source 1..27: mol_type = other RNA
atttaaaagtaatttttaaaaaagagt

SEQ ID NO: 2543 - RNA, 27 nt, synthetic construct
  misc_feature 1..27: note = Description of Artificial Sequence: Syntheticoligonucleotide
  source 1..27: mol_type = other RNA
tatttaaaagtaatttttaaaaaagag

SEQ ID NO: 2544 - RNA, 27 nt, synthetic construct
  misc_feature 1..27: note = Description of Artificial Sequence: Syntheticoligonucleotide
  source 1..27: mol_type = other RNA
atatttaaaagtaatttttaaaaaaga

SEQ ID NO: 2545 - RNA, 27 nt, synthetic construct
  misc_feature 1..27: note = Description of Artificial Sequence: Syntheticoligonucleotide
  source 1..27: mol_type = other RNA
aatatttaaaagtaatttttaaaaaag

SEQ ID NO: 2546 - RNA, 27 nt, synthetic construct
  misc_feature 1..27: note = Description of Artificial Sequence: Syntheticoligonucleotide
  source 1..27: mol_type = other RNA
taatatttaaaagtaatttttaaaaaa

SEQ ID NO: 2547 - RNA, 27 nt, synthetic construct
  misc_feature 1..27: note = Description of Artificial Sequence: Syntheticoligonucleotide
  source 1..27: mol_type = other RNA
ttaatatttaaaagtaatttttaaaaa

SEQ ID NO: 2548 - RNA, 27 nt, synthetic construct
  misc_feature 1..27: note = Description of Artificial Sequence: Syntheticoligonucleotide
  source 1..27: mol_type = other RNA
gttaatatttaaaagtaatttttaaaa

SEQ ID NO: 2549 - RNA, 27 nt, synthetic construct
  misc_feature 1..27: note = Description of Artificial Sequence: Syntheticoligonucleotide
  source 1..27: mol_type = other RNA
agttaatatttaaaagtaatttttaaa

SEQ ID NO: 2550 - RNA, 27 nt, synthetic construct
  misc_feature 1..27: note = Description of Artificial Sequence: Syntheticoligonucleotide
  source 1..27: mol_type = other RNA
acttttgagttaatatttaaaagtaat

SEQ ID NO: 2551 - RNA, 27 nt, synthetic construct
  misc_feature 1..27: note = Description of Artificial Sequence: Syntheticoligonucleotide
  source 1..27: mol_type = other RNA
aacttttgagttaatatttaaaagtaa

SEQ ID NO: 2552 - RNA, 27 nt, synthetic construct
  misc_feature 1..27: note = Description of Artificial Sequence: Syntheticoligonucleotide
  source 1..27: mol_type = other RNA
tcaacttttgagttaatatttaaaagt

SEQ ID NO: 2553 - RNA, 27 nt, synthetic construct
  misc_feature 1..27: note = Description of Artificial Sequence: Syntheticoligonucleotide
  source 1..27: mol_type = other RNA
tctcaacttttgagttaatatttaaaa

SEQ ID NO: 2554 - RNA, 27 nt, synthetic construct
  misc_feature 1..27: note = Description of Artificial Sequence: Syntheticoligonucleotide
  source 1..27: mol_type = other RNA
atctcaacttttgagttaatatttaaa

SEQ ID NO: 2555 - RNA, 27 nt, synthetic construct
  misc_feature 1..27: note = Description of Artificial Sequence: Syntheticoligonucleotide
  source 1..27: mol_type = other RNA
aatctcaacttttgagttaatatttaa

SEQ ID NO: 2556 - RNA, 27 nt, synthetic construct
  misc_feature 1..27: note = Description of Artificial Sequence: Syntheticoligonucleotide
  source 1..27: mol_type = other RNA
aaatctcaacttttgagttaatattta

SEQ ID NO: 2557 - RNA, 27 nt, synthetic construct
  misc_feature 1..27: note = Description of Artificial Sequence: Syntheticoligonucleotide
  source 1..27: mol_type = other RNA
aaaaaaattaatgtcttggcacaccac

SEQ ID NO: 2558 - RNA, 27 nt, synthetic construct
  misc_feature 1..27: note = Description of Artificial Sequence: Syntheticoligonucleotide
  source 1..27: mol_type = other RNA
ttaaaaaaaaaattaatgtcttggcac

SEQ ID NO: 2559 - RNA, 27 nt, synthetic construct
  misc_feature 1..27: note = Description of Artificial Sequence: Syntheticoligonucleotide
  source 1..27: mol_type = other RNA
tttaaaaaaaaaattaatgtcttggca

SEQ ID NO: 2560 - RNA, 27 nt, synthetic construct
  misc_feature 1..27: note = Description of Artificial Sequence: Syntheticoligonucleotide
  source 1..27: mol_type = other RNA
tcattgtttaaaaaaaaaattaatgtc

SEQ ID NO: 2561 - RNA, 27 nt, synthetic construct
  misc_feature 1..27: note = Description of Artificial Sequence: Syntheticoligonucleotide
  source 1..27: mol_type = other RNA
ttcattgtttaaaaaaaaaattaatgt

SEQ ID NO: 2562 - RNA, 27 nt, synthetic construct
  misc_feature 1..27: note = Description of Artificial Sequence: Syntheticoligonucleotide
  source 1..27: mol_type = other RNA
acttcattgtttaaaaaaaaaattaat

SEQ ID NO: 2563 - RNA, 27 nt, synthetic construct
  misc_feature 1..27: note = Description of Artificial Sequence: Syntheticoligonucleotide
  source 1..27: mol_type = other RNA
tcacttcattgtttaaaaaaaaaatta

SEQ ID NO: 2564 - RNA, 27 nt, synthetic construct
  misc_feature 1..27: note = Description of Artificial Sequence: Syntheticoligonucleotide
  source 1..27: mol_type = other RNA
ttcacttcattgtttaaaaaaaaaatt

SEQ ID NO: 2565 - RNA, 27 nt, synthetic construct
  misc_feature 1..27: note = Description of Artificial Sequence: Syntheticoligonucleotide
  source 1..27: mol_type = other RNA
tttcacttcattgtttaaaaaaaaaat

SEQ ID NO: 2566 - RNA, 27 nt, synthetic construct
  misc_feature 1..27: note = Description of Artificial Sequence: Syntheticoligonucleotide
  source 1..27: mol_type = other RNA
ttttcacttcattgtttaaaaaaaaaa

SEQ ID NO: 2567 - RNA, 27 nt, synthetic construct
  misc_feature 1..27: note = Description of Artificial Sequence: Syntheticoligonucleotide
  source 1..27: mol_type = other RNA
tttttcacttcattgtttaaaaaaaaa

SEQ ID NO: 2568 - RNA, 27 nt, synthetic construct
  misc_feature 1..27: note = Description of Artificial Sequence: Syntheticoligonucleotide
  source 1..27: mol_type = other RNA
actttttcacttcattgtttaaaaaaa

SEQ ID NO: 2569 - RNA, 27 nt, synthetic construct
  misc_feature 1..27: note = Description of Artificial Sequence: Syntheticoligonucleotide
  source 1..27: mol_type = other RNA
aactttttcacttcattgtttaaaaaa

SEQ ID NO: 2570 - RNA, 27 nt, synthetic construct
  misc_feature 1..27: note = Description of Artificial Sequence: Syntheticoligonucleotide
  source 1..27: mol_type = other RNA
aaactttttcacttcattgtttaaaaa

SEQ ID NO: 2571 - RNA, 27 nt, synthetic construct
  misc_feature 1..27: note = Description of Artificial Sequence: Syntheticoligonucleotide
  source 1..27: mol_type = other RNA
agattgtaaaactttttcacttcattg

SEQ ID NO: 2572 - RNA, 27 nt, synthetic construct
  misc_feature 1..27: note = Description of Artificial Sequence: Syntheticoligonucleotide
  source 1..27: mol_type = other RNA
acctagagattgtaaaactttttcact

SEQ ID NO: 2573 - RNA, 27 nt, synthetic construct
  misc_feature 1..27: note = Description of Artificial Sequence: Syntheticoligonucleotide
  source 1..27: mol_type = other RNA
aacctagagattgtaaaactttttcac

SEQ ID NO: 2574 - RNA, 27 nt, synthetic construct
  misc_feature 1..27: note = Description of Artificial Sequence: Syntheticoligonucleotide
  source 1..27: mol_type = other RNA
aaacctagagattgtaaaactttttca

SEQ ID NO: 2575 - RNA, 27 nt, synthetic construct
  misc_feature 1..27: note = Description of Artificial Sequence: Syntheticoligonucleotide
  source 1..27: mol_type = other RNA
tttatgcaatgttaatttaaccagtgt

SEQ ID NO: 2576 - RNA, 27 nt, synthetic construct
  misc_feature 1..27: note = Description of Artificial Sequence: Syntheticoligonucleotide
  source 1..27: mol_type = other RNA
gtttatgcaatgttaatttaaccagtg

SEQ ID NO: 2577 - RNA, 27 nt, synthetic construct
  misc_feature 1..27: note = Description of Artificial Sequence: Syntheticoligonucleotide
  source 1..27: mol_type = other RNA
tgtttatgcaatgttaatttaaccagt

SEQ ID NO: 2578 - RNA, 27 nt, synthetic construct
  misc_feature 1..27: note = Description of Artificial Sequence: Syntheticoligonucleotide
  source 1..27: mol_type = other RNA
gacttgaaaagtgtttatgcaatgtta

SEQ ID NO: 2579 - RNA, 27 nt, synthetic construct
  misc_feature 1..27: note = Description of Artificial Sequence: Syntheticoligonucleotide
  source 1..27: mol_type = other RNA
attattaaatatggatcagacttgaaa

SEQ ID NO: 2580 - RNA, 27 nt, synthetic construct
  misc_feature 1..27: note = Description of Artificial Sequence: Syntheticoligonucleotide
  source 1..27: mol_type = other RNA
attttaaagcattattaaatatggatc

SEQ ID NO: 2581 - RNA, 27 nt, synthetic construct
  misc_feature 1..27: note = Description of Artificial Sequence: Syntheticoligonucleotide
  source 1..27: mol_type = other RNA
tattttaaagcattattaaatatggat

SEQ ID NO: 2582 - RNA, 27 nt, synthetic construct
  misc_feature 1..27: note = Description of Artificial Sequence: Syntheticoligonucleotide
  source 1..27: mol_type = other RNA
ttattttaaagcattattaaatatgga

SEQ ID NO: 2583 - RNA, 27 nt, synthetic construct
  misc_feature 1..27: note = Description of Artificial Sequence: Syntheticoligonucleotide
  source 1..27: mol_type = other RNA
tttattttaaagcattattaaatatgg

SEQ ID NO: 2584 - RNA, 27 nt, synthetic construct
  misc_feature 1..27: note = Description of Artificial Sequence: Syntheticoligonucleotide
  source 1..27: mol_type = other RNA
ttttattttaaagcattattaaatatg

SEQ ID NO: 2585 - RNA, 27 nt, synthetic construct
  misc_feature 1..27: note = Description of Artificial Sequence: Syntheticoligonucleotide
  source 1..27: mol_type = other RNA
tttttattttaaagcattattaaatat

SEQ ID NO: 2586 - RNA, 27 nt, synthetic construct
  misc_feature 1..27: note = Description of Artificial Sequence: Syntheticoligonucleotide
  source 1..27: mol_type = other RNA
tatttttattttaaagcattattaaat

SEQ ID NO: 2587 - RNA, 27 nt, synthetic construct
  misc_feature 1..27: note = Description of Artificial Sequence: Syntheticoligonucleotide
  source 1..27: mol_type = other RNA
ttatttttattttaaagcattattaaa

SEQ ID NO: 2588 - RNA, 27 nt, synthetic construct
  misc_feature 1..27: note = Description of Artificial Sequence: Syntheticoligonucleotide
  source 1..27: mol_type = other RNA
tttatttttattttaaagcattattaa

SEQ ID NO: 2589 - RNA, 27 nt, synthetic construct
  misc_feature 1..27: note = Description of Artificial Sequence: Syntheticoligonucleotide
  source 1..27: mol_type = other RNA
ttttatttttattttaaagcattatta

SEQ ID NO: 2590 - RNA, 27 nt, synthetic construct
  misc_feature 1..27: note = Description of Artificial Sequence: Syntheticoligonucleotide
  source 1..27: mol_type = other RNA
ggattgtttttatttttattttaaagc

SEQ ID NO: 2591 - RNA, 27 nt, synthetic construct
  misc_feature 1..27: note = Description of Artificial Sequence: Syntheticoligonucleotide
  source 1..27: mol_type = other RNA
tcaaaaggattgtttttatttttattt

SEQ ID NO: 2592 - RNA, 27 nt, synthetic construct
  misc_feature 1..27: note = Description of Artificial Sequence: Syntheticoligonucleotide
  source 1..27: mol_type = other RNA
atcaaaaggattgtttttatttttatt

SEQ ID NO: 2593 - RNA, 27 nt, synthetic construct
  misc_feature 1..27: note = Description of Artificial Sequence: Syntheticoligonucleotide
  source 1..27: mol_type = other RNA
tatcaaaaggattgtttttatttttat

SEQ ID NO: 2594 - RNA, 27 nt, synthetic construct
  misc_feature 1..27: note = Description of Artificial Sequence: Syntheticoligonucleotide
  source 1..27: mol_type = other RNA
ttatcaaaaggattgtttttattttta

SEQ ID NO: 2595 - RNA, 27 nt, synthetic construct
  misc_feature 1..27: note = Description of Artificial Sequence: Syntheticoligonucleotide
  source 1..27: mol_type = other RNA
tttatcaaaaggattgtttttattttt

SEQ ID NO: 2596 - RNA, 27 nt, synthetic construct
  misc_feature 1..27: note = Description of Artificial Sequence: Syntheticoligonucleotide
  source 1..27: mol_type = other RNA
atttatcaaaaggattgtttttatttt

SEQ ID NO: 2597 - RNA, 27 nt, synthetic construct
  misc_feature 1..27: note = Description of Artificial Sequence: Syntheticoligonucleotide
  source 1..27: mol_type = other RNA
aatttatcaaaaggattgtttttattt

SEQ ID NO: 2598 - RNA, 27 nt, synthetic construct
  misc_feature 1..27: note = Description of Artificial Sequence: Syntheticoligonucleotide
  source 1..27: mol_type = other RNA
aaatttatcaaaaggattgtttttatt

SEQ ID NO: 2599 - RNA, 27 nt, synthetic construct
  misc_feature 1..27: note = Description of Artificial Sequence: Syntheticoligonucleotide
  source 1..27: mol_type = other RNA
ttttaaatttatcaaaaggattgtttt

SEQ ID NO: 2600 - RNA, 27 nt, synthetic construct
  misc_feature 1..27: note = Description of Artificial Sequence: Syntheticoligonucleotide
  source 1..27: mol_type = other RNA
taacattttaaatttatcaaaaggatt

SEQ ID NO: 2601 - RNA, 27 nt, synthetic construct
  misc_feature 1..27: note = Description of Artificial Sequence: Syntheticoligonucleotide
  source 1..27: mol_type = other RNA
gtaacattttaaatttatcaaaaggat

SEQ ID NO: 2602 - RNA, 27 nt, synthetic construct
  misc_feature 1..27: note = Description of Artificial Sequence: Syntheticoligonucleotide
  source 1..27: mol_type = other RNA
agtaacattttaaatttatcaaaagga

SEQ ID NO: 2603 - RNA, 27 nt, synthetic construct
  misc_feature 1..27: note = Description of Artificial Sequence: Syntheticoligonucleotide
  source 1..27: mol_type = other RNA
aataagtaacattttaaatttatcaaa

SEQ ID NO: 2604 - RNA, 27 nt, synthetic construct
  misc_feature 1..27: note = Description of Artificial Sequence: Syntheticoligonucleotide
  source 1..27: mol_type = other RNA
aaataagtaacattttaaatttatcaa

SEQ ID NO: 2605 - RNA, 27 nt, synthetic construct
  misc_feature 1..27: note = Description of Artificial Sequence: Syntheticoligonucleotide
  source 1..27: mol_type = other RNA
aaaataagtaacattttaaatttatca

SEQ ID NO: 2606 - RNA, 27 nt, synthetic construct
  misc_feature 1..27: note = Description of Artificial Sequence: Syntheticoligonucleotide
  source 1..27: mol_type = other RNA
taaaataagtaacattttaaatttatc

SEQ ID NO: 2607 - RNA, 27 nt, synthetic construct
  misc_feature 1..27: note = Description of Artificial Sequence: Syntheticoligonucleotide
  source 1..27: mol_type = other RNA
ttaaaataagtaacattttaaatttat

SEQ ID NO: 2608 - RNA, 27 nt, synthetic construct
  misc_feature 1..27: note = Description of Artificial Sequence: Syntheticoligonucleotide
  source 1..27: mol_type = other RNA
tttaaaataagtaacattttaaattta

SEQ ID NO: 2609 - RNA, 27 nt, synthetic construct
  misc_feature 1..27: note = Description of Artificial Sequence: Syntheticoligonucleotide
  source 1..27: mol_type = other RNA
attttaaaataagtaacattttaaatt

SEQ ID NO: 2610 - RNA, 27 nt, synthetic construct
  misc_feature 1..27: note = Description of Artificial Sequence: Syntheticoligonucleotide
  source 1..27: mol_type = other RNA
tattttaaaataagtaacattttaaat

SEQ ID NO: 2611 - RNA, 27 nt, synthetic construct
  misc_feature 1..27: note = Description of Artificial Sequence: Syntheticoligonucleotide
  source 1..27: mol_type = other RNA
ttattttaaaataagtaacattttaaa

SEQ ID NO: 2612 - RNA, 27 nt, synthetic construct
  misc_feature 1..27: note = Description of Artificial Sequence: Syntheticoligonucleotide
  source 1..27: mol_type = other RNA
tttattttaaaataagtaacattttaa

SEQ ID NO: 2613 - RNA, 27 nt, synthetic construct
  misc_feature 1..27: note = Description of Artificial Sequence: Syntheticoligonucleotide
  source 1..27: mol_type = other RNA
atttattttaaaataagtaacatttta

SEQ ID NO: 2614 - RNA, 27 nt, synthetic construct
  misc_feature 1..27: note = Description of Artificial Sequence: Syntheticoligonucleotide
  source 1..27: mol_type = other RNA
tcatttattttaaaataagtaacattt

SEQ ID NO: 2615 - RNA, 27 nt, synthetic construct
  misc_feature 1..27: note = Description of Artificial Sequence: Syntheticoligonucleotide
  source 1..27: mol_type = other RNA
tcacttcatttattttaaaataagtaa

SEQ ID NO: 2616 - RNA, 27 nt, synthetic construct
  misc_feature 1..27: note = Description of Artificial Sequence: Syntheticoligonucleotide
  source 1..27: mol_type = other RNA
tctcacttcatttattttaaaataagt

SEQ ID NO: 2617 - RNA, 27 nt, synthetic construct
  misc_feature 1..27: note = Description of Artificial Sequence: Syntheticoligonucleotide
  source 1..27: mol_type = other RNA
atctcacttcatttattttaaaataag

SEQ ID NO: 2618 - RNA, 27 nt, synthetic construct
  misc_feature 1..27: note = Description of Artificial Sequence: Syntheticoligonucleotide
  source 1..27: mol_type = other RNA
gccatctcacttcatttattttaaaat

SEQ ID NO: 2619 - RNA, 27 nt, synthetic construct
  misc_feature 1..27: note = Description of Artificial Sequence: Syntheticoligonucleotide
  source 1..27: mol_type = other RNA
tgccatctcacttcatttattttaaaa

SEQ ID NO: 2620 - RNA, 27 nt, synthetic construct
  misc_feature 1..27: note = Description of Artificial Sequence: Syntheticoligonucleotide
  source 1..27: mol_type = other RNA
acttcttttaacatgaagaaatggata

SEQ ID NO: 2621 - RNA, 27 nt, synthetic construct
  misc_feature 1..27: note = Description of Artificial Sequence: Syntheticoligonucleotide
  source 1..27: mol_type = other RNA
gacttcttttaacatgaagaaatggat

SEQ ID NO: 2622 - RNA, 27 nt, synthetic construct
  misc_feature 1..27: note = Description of Artificial Sequence: Syntheticoligonucleotide
  source 1..27: mol_type = other RNA
aaaaaaaaaaaactaagagtttgagat

SEQ ID NO: 2623 - RNA, 27 nt, synthetic construct
  misc_feature 1..27: note = Description of Artificial Sequence: Syntheticoligonucleotide
  source 1..27: mol_type = other RNA
acatagttgtaaaaaaaaaaaactaag

SEQ ID NO: 2624 - RNA, 27 nt, synthetic construct
  misc_feature 1..27: note = Description of Artificial Sequence: Syntheticoligonucleotide
  source 1..27: mol_type = other RNA
tacatagttgtaaaaaaaaaaaactaa

SEQ ID NO: 2625 - RNA, 27 nt, synthetic construct
  misc_feature 1..27: note = Description of Artificial Sequence: Syntheticoligonucleotide
  source 1..27: mol_type = other RNA
ttacatagttgtaaaaaaaaaaaacta

SEQ ID NO: 2626 - RNA, 27 nt, synthetic construct
  misc_feature 1..27: note = Description of Artificial Sequence: Syntheticoligonucleotide
  source 1..27: mol_type = other RNA
attacatagttgtaaaaaaaaaaaact

SEQ ID NO: 2627 - RNA, 27 nt, synthetic construct
  misc_feature 1..27: note = Description of Artificial Sequence: Syntheticoligonucleotide
  source 1..27: mol_type = other RNA
aattacatagttgtaaaaaaaaaaaac

SEQ ID NO: 2628 - RNA, 27 nt, synthetic construct
  misc_feature 1..27: note = Description of Artificial Sequence: Syntheticoligonucleotide
  source 1..27: mol_type = other RNA
aaattacatagttgtaaaaaaaaaaaa

SEQ ID NO: 2629 - RNA, 27 nt, synthetic construct
  misc_feature 1..27: note = Description of Artificial Sequence: Syntheticoligonucleotide
  source 1..27: mol_type = other RNA
taaattacatagttgtaaaaaaaaaaa

SEQ ID NO: 2630 - RNA, 27 nt, synthetic construct
  misc_feature 1..27: note = Description of Artificial Sequence: Syntheticoligonucleotide
  source 1..27: mol_type = other RNA
ataaattacatagttgtaaaaaaaaaa

SEQ ID NO: 2631 - RNA, 27 nt, synthetic construct
  misc_feature 1..27: note = Description of Artificial Sequence: Syntheticoligonucleotide
  source 1..27: mol_type = other RNA
tataaattacatagttgtaaaaaaaaa

SEQ ID NO: 2632 - RNA, 27 nt, synthetic construct
  misc_feature 1..27: note = Description of Artificial Sequence: Syntheticoligonucleotide
  source 1..27: mol_type = other RNA
atataaattacatagttgtaaaaaaaa

SEQ ID NO: 2633 - RNA, 27 nt, synthetic construct
  misc_feature 1..27: note = Description of Artificial Sequence: Syntheticoligonucleotide
  source 1..27: mol_type = other RNA
aatataaattacatagttgtaaaaaaa

SEQ ID NO: 2634 - RNA, 27 nt, synthetic construct
  misc_feature 1..27: note = Description of Artificial Sequence: Syntheticoligonucleotide
  source 1..27: mol_type = other RNA
taaatggaatataaattacatagttgt

SEQ ID NO: 2635 - RNA, 27 nt, synthetic construct
  misc_feature 1..27: note = Description of Artificial Sequence: Syntheticoligonucleotide
  source 1..27: mol_type = other RNA
gtaaatggaatataaattacatagttg

SEQ ID NO: 2636 - RNA, 27 nt, synthetic construct
  misc_feature 1..27: note = Description of Artificial Sequence: Syntheticoligonucleotide
  source 1..27: mol_type = other RNA
tgtaaatggaatataaattacatagtt

SEQ ID NO: 2637 - RNA, 27 nt, synthetic construct
  misc_feature 1..27: note = Description of Artificial Sequence: Syntheticoligonucleotide
  source 1..27: mol_type = other RNA
tccttatgtaaatggaatataaattac

SEQ ID NO: 2638 - RNA, 27 nt, synthetic construct
  misc_feature 1..27: note = Description of Artificial Sequence: Syntheticoligonucleotide
  source 1..27: mol_type = other RNA
atccttatgtaaatggaatataaatta

SEQ ID NO: 2639 - RNA, 27 nt, synthetic construct
  misc_feature 1..27: note = Description of Artificial Sequence: Syntheticoligonucleotide
  source 1..27: mol_type = other RNA
tatccttatgtaaatggaatataaatt

SEQ ID NO: 2640 - RNA, 27 nt, synthetic construct
  misc_feature 1..27: note = Description of Artificial Sequence: Syntheticoligonucleotide
  source 1..27: mol_type = other RNA
gtatccttatgtaaatggaatataaat

SEQ ID NO: 2641 - RNA, 27 nt, synthetic construct
  misc_feature 1..27: note = Description of Artificial Sequence: Syntheticoligonucleotide
  source 1..27: mol_type = other RNA
tgacaaataagtgtatccttatgtaaa

SEQ ID NO: 2642 - RNA, 27 nt, synthetic construct
  misc_feature 1..27: note = Description of Artificial Sequence: Syntheticoligonucleotide
  source 1..27: mol_type = other RNA
agcttgacaaataagtgtatccttatg

SEQ ID NO: 2643 - RNA, 27 nt, synthetic construct
  misc_feature 1..27: note = Description of Artificial Sequence: Syntheticoligonucleotide
  source 1..27: mol_type = other RNA
taacataggttaaaaatttacagattg

SEQ ID NO: 2644 - RNA, 27 nt, synthetic construct
  misc_feature 1..27: note = Description of Artificial Sequence: Syntheticoligonucleotide
  source 1..27: mol_type = other RNA
gtaacataggttaaaaatttacagatt

SEQ ID NO: 2645 - RNA, 27 nt, synthetic construct
  misc_feature 1..27: note = Description of Artificial Sequence: Syntheticoligonucleotide
  source 1..27: mol_type = other RNA
tgtaacataggttaaaaatttacagat

SEQ ID NO: 2646 - RNA, 27 nt, synthetic construct
  misc_feature 1..27: note = Description of Artificial Sequence: Syntheticoligonucleotide
  source 1..27: mol_type = other RNA
tcaaatataaacttcacctcttgcaca

SEQ ID NO: 2647 - RNA, 27 nt, synthetic construct
  misc_feature 1..27: note = Description of Artificial Sequence: Syntheticoligonucleotide
  source 1..27: mol_type = other RNA
attcaaatataaacttcacctcttgca

SEQ ID NO: 2648 - RNA, 27 nt, synthetic construct
  misc_feature 1..27: note = Description of Artificial Sequence: Syntheticoligonucleotide
  source 1..27: mol_type = other RNA
tattcaaatataaacttcacctcttgc

SEQ ID NO: 2649 - RNA, 27 nt, synthetic construct
  misc_feature 1..27: note = Description of Artificial Sequence: Syntheticoligonucleotide
  source 1..27: mol_type = other RNA
gatattcaaatataaacttcacctctt

SEQ ID NO: 2650 - RNA, 27 nt, synthetic construct
  misc_feature 1..27: note = Description of Artificial Sequence: Syntheticoligonucleotide
  source 1..27: mol_type = other RNA
ggatattcaaatataaacttcacctct

SEQ ID NO: 2651 - RNA, 27 nt, synthetic construct
  misc_feature 1..27: note = Description of Artificial Sequence: Syntheticoligonucleotide
  source 1..27: mol_type = other RNA
agaatggatattcaaatataaacttca

SEQ ID NO: 2652 - RNA, 27 nt, synthetic construct
  misc_feature 1..27: note = Description of Artificial Sequence: Syntheticoligonucleotide
  source 1..27: mol_type = other RNA
tacaagtattaaaactgcatcaagtca

SEQ ID NO: 2653 - RNA, 27 nt, synthetic construct
  misc_feature 1..27: note = Description of Artificial Sequence: Syntheticoligonucleotide
  source 1..27: mol_type = other RNA
attacaagtattaaaactgcatcaagt

SEQ ID NO: 2654 - RNA, 27 nt, synthetic construct
  misc_feature 1..27: note = Description of Artificial Sequence: Syntheticoligonucleotide
  source 1..27: mol_type = other RNA
tgaaaattagtgattaggtcaaatccc

SEQ ID NO: 2655 - RNA, 27 nt, synthetic construct
  misc_feature 1..27: note = Description of Artificial Sequence: Syntheticoligonucleotide
  source 1..27: mol_type = other RNA
accacctgaaaattagtgattaggtca

SEQ ID NO: 2656 - RNA, 27 nt, synthetic construct
  misc_feature 1..27: note = Description of Artificial Sequence: Syntheticoligonucleotide
  source 1..27: mol_type = other RNA
ataccaggtttgaaaaatcctactgtc

SEQ ID NO: 2657 - RNA, 27 nt, synthetic construct
  misc_feature 1..27: note = Description of Artificial Sequence: Syntheticoligonucleotide
  source 1..27: mol_type = other RNA
atctttattaaattctccttccactgg

SEQ ID NO: 2658 - RNA, 27 nt, synthetic construct
  misc_feature 1..27: note = Description of Artificial Sequence: Syntheticoligonucleotide
  source 1..27: mol_type = other RNA
actatctttattaaattctccttccac

SEQ ID NO: 2659 - RNA, 27 nt, synthetic construct
  misc_feature 1..27: note = Description of Artificial Sequence: Syntheticoligonucleotide
  source 1..27: mol_type = other RNA
gcactatctttattaaattctccttcc

SEQ ID NO: 2660 - RNA, 27 nt, synthetic construct
  misc_feature 1..27: note = Description of Artificial Sequence: Syntheticoligonucleotide
  source 1..27: mol_type = other RNA
agcactatctttattaaattctccttc

SEQ ID NO: 2661 - RNA, 27 nt, synthetic construct
  misc_feature 1..27: note = Description of Artificial Sequence: Syntheticoligonucleotide
  source 1..27: mol_type = other RNA
tttcagcactatctttattaaattctc

SEQ ID NO: 2662 - RNA, 27 nt, synthetic construct
  misc_feature 1..27: note = Description of Artificial Sequence: Syntheticoligonucleotide
  source 1..27: mol_type = other RNA
gtcctagttatagattacctaaggaat

SEQ ID NO: 2663 - RNA, 27 nt, synthetic construct
  misc_feature 1..27: note = Description of Artificial Sequence: Syntheticoligonucleotide
  source 1..27: mol_type = other RNA
agtcctagttatagattacctaaggaa

SEQ ID NO: 2664 - RNA, 27 nt, synthetic construct
  misc_feature 1..27: note = Description of Artificial Sequence: Syntheticoligonucleotide
  source 1..27: mol_type = other RNA
taaaacaatggaatgtattactgttac

SEQ ID NO: 2665 - RNA, 27 nt, synthetic construct
  misc_feature 1..27: note = Description of Artificial Sequence: Syntheticoligonucleotide
  source 1..27: mol_type = other RNA
actaaaacaatggaatgtattactgtt

SEQ ID NO: 2666 - RNA, 27 nt, synthetic construct
  misc_feature 1..27: note = Description of Artificial Sequence: Syntheticoligonucleotide
  source 1..27: mol_type = other RNA
tactaaaacaatggaatgtattactgt

SEQ ID NO: 2667 - RNA, 27 nt, synthetic construct
  misc_feature 1..27: note = Description of Artificial Sequence: Syntheticoligonucleotide
  source 1..27: mol_type = other RNA
ttactaaaacaatggaatgtattactg

SEQ ID NO: 2668 - RNA, 27 nt, synthetic construct
  misc_feature 1..27: note = Description of Artificial Sequence: Syntheticoligonucleotide
  source 1..27: mol_type = other RNA
agatttctggttactaaaacaatggaa

SEQ ID NO: 2669 - RNA, 27 nt, synthetic construct
  misc_feature 1..27: note = Description of Artificial Sequence: Syntheticoligonucleotide
  source 1..27: mol_type = other RNA
ttttcattgcatgaagatttctggtta

SEQ ID NO: 2670 - RNA, 27 nt, synthetic construct
  misc_feature 1..27: note = Description of Artificial Sequence: Syntheticoligonucleotide
  source 1..27: mol_type = other RNA
attaaagtatttttcattgcatgaaga

SEQ ID NO: 2671 - RNA, 27 nt, synthetic construct
  misc_feature 1..27: note = Description of Artificial Sequence: Syntheticoligonucleotide
  source 1..27: mol_type = other RNA
ttcatgaattaaagtatttttcattgc

SEQ ID NO: 2672 - RNA, 27 nt, synthetic construct
  misc_feature 1..27: note = Description of Artificial Sequence: Syntheticoligonucleotide
  source 1..27: mol_type = other RNA
gcttcatgaattaaagtatttttcatt

SEQ ID NO: 2673 - RNA, 27 nt, synthetic construct
  misc_feature 1..27: note = Description of Artificial Sequence: Syntheticoligonucleotide
  source 1..27: mol_type = other RNA
agcttcatgaattaaagtatttttcat

SEQ ID NO: 2674 - RNA, 27 nt, synthetic construct
  misc_feature 1..27: note = Description of Artificial Sequence: Syntheticoligonucleotide
  source 1..27: mol_type = other RNA
aaaaaaaaaaagtaagcttcatgaatt

SEQ ID NO: 2675 - RNA, 27 nt, synthetic construct
  misc_feature 1..27: note = Description of Artificial Sequence: Syntheticoligonucleotide
  source 1..27: mol_type = other RNA
accaaaaaaaaaaagtaagcttcatga

SEQ ID NO: 2676 - RNA, 27 nt, synthetic construct
  misc_feature 1..27: note = Description of Artificial Sequence: Syntheticoligonucleotide
  source 1..27: mol_type = other RNA
tgacaccaaaaaaaaaaagtaagcttc

SEQ ID NO: 2677 - RNA, 27 nt, synthetic construct
  misc_feature 1..27: note = Description of Artificial Sequence: Syntheticoligonucleotide
  source 1..27: mol_type = other RNA
actctgacaccaaaaaaaaaaagtaag

SEQ ID NO: 2678 - RNA, 27 nt, synthetic construct
  misc_feature 1..27: note = Description of Artificial Sequence: Syntheticoligonucleotide
  source 1..27: mol_type = other RNA
gactctgacaccaaaaaaaaaaagtaa

SEQ ID NO: 2679 - RNA, 27 nt, synthetic construct
  misc_feature 1..27: note = Description of Artificial Sequence: Syntheticoligonucleotide
  source 1..27: mol_type = other RNA
tctcctaaaaatacaaaaattagttga

SEQ ID NO: 2680 - RNA, 27 nt, synthetic construct
  misc_feature 1..27: note = Description of Artificial Sequence: Syntheticoligonucleotide
  source 1..27: mol_type = other RNA
gtctctcctaaaaatacaaaaattagt

SEQ ID NO: 2681 - RNA, 27 nt, synthetic construct
  misc_feature 1..27: note = Description of Artificial Sequence: Syntheticoligonucleotide
  source 1..27: mol_type = other RNA
aataaatatttgctgaataaatgagtt

SEQ ID NO: 2682 - RNA, 27 nt, synthetic construct
  misc_feature 1..27: note = Description of Artificial Sequence: Syntheticoligonucleotide
  source 1..27: mol_type = other RNA
tcaataaatatttgctgaataaatgag

SEQ ID NO: 2683 - RNA, 27 nt, synthetic construct
  misc_feature 1..27: note = Description of Artificial Sequence: Syntheticoligonucleotide
  source 1..27: mol_type = other RNA
actcaataaatatttgctgaataaatg

SEQ ID NO: 2684 - RNA, 27 nt, synthetic construct
  misc_feature 1..27: note = Description of Artificial Sequence: Syntheticoligonucleotide
  source 1..27: mol_type = other RNA
accccttctttgcaaaactaaaatacg

SEQ ID NO: 2685 - RNA, 27 nt, synthetic construct
  misc_feature 1..27: note = Description of Artificial Sequence: Syntheticoligonucleotide
  source 1..27: mol_type = other RNA
gaatcgtagcaaaacaattatagagct

SEQ ID NO: 2686 - RNA, 27 nt, synthetic construct
  misc_feature 1..27: note = Description of Artificial Sequence: Syntheticoligonucleotide
  source 1..27: mol_type = other RNA
acaatgaagtgatttacataaagtagc

SEQ ID NO: 2687 - RNA, 27 nt, synthetic construct
  misc_feature 1..27: note = Description of Artificial Sequence: Syntheticoligonucleotide
  source 1..27: mol_type = other RNA
aacaatgaagtgatttacataaagtag

SEQ ID NO: 2688 - RNA, 27 nt, synthetic construct
  misc_feature 1..27: note = Description of Artificial Sequence: Syntheticoligonucleotide
  source 1..27: mol_type = other RNA
aaacaatgaagtgatttacataaagta

SEQ ID NO: 2689 - RNA, 27 nt, synthetic construct
  misc_feature 1..27: note = Description of Artificial Sequence: Syntheticoligonucleotide
  source 1..27: mol_type = other RNA
aaaacaatgaagtgatttacataaagt

SEQ ID NO: 2690 - RNA, 27 nt, synthetic construct
  misc_feature 1..27: note = Description of Artificial Sequence: Syntheticoligonucleotide
  source 1..27: mol_type = other RNA
taaaacaatgaagtgatttacataaag

SEQ ID NO: 2691 - RNA, 27 nt, synthetic construct
  misc_feature 1..27: note = Description of Artificial Sequence: Syntheticoligonucleotide
  source 1..27: mol_type = other RNA
ttaaaacaatgaagtgatttacataaa

SEQ ID NO: 2692 - RNA, 27 nt, synthetic construct
  misc_feature 1..27: note = Description of Artificial Sequence: Syntheticoligonucleotide
  source 1..27: mol_type = other RNA
tttaaaacaatgaagtgatttacataa

SEQ ID NO: 2693 - RNA, 27 nt, synthetic construct
  misc_feature 1..27: note = Description of Artificial Sequence: Syntheticoligonucleotide
  source 1..27: mol_type = other RNA
atcaagtttattcctttaaaacaatga

SEQ ID NO: 2694 - RNA, 27 nt, synthetic construct
  misc_feature 1..27: note = Description of Artificial Sequence: Syntheticoligonucleotide
  source 1..27: mol_type = other RNA
aatcaagtttattcctttaaaacaatg

SEQ ID NO: 2695 - RNA, 27 nt, synthetic construct
  misc_feature 1..27: note = Description of Artificial Sequence: Syntheticoligonucleotide
  source 1..27: mol_type = other RNA
tataatcaagtttattcctttaaaaca

SEQ ID NO: 2696 - RNA, 27 nt, synthetic construct
  misc_feature 1..27: note = Description of Artificial Sequence: Syntheticoligonucleotide
  source 1..27: mol_type = other RNA
atataatcaagtttattcctttaaaac

SEQ ID NO: 2697 - RNA, 27 nt, synthetic construct
  misc_feature 1..27: note = Description of Artificial Sequence: Syntheticoligonucleotide
  source 1..27: mol_type = other RNA
aatataatcaagtttattcctttaaaa

SEQ ID NO: 2698 - RNA, 27 nt, synthetic construct
  misc_feature 1..27: note = Description of Artificial Sequence: Syntheticoligonucleotide
  source 1..27: mol_type = other RNA
acaatataatcaagtttattcctttaa

SEQ ID NO: 2699 - RNA, 27 nt, synthetic construct
  misc_feature 1..27: note = Description of Artificial Sequence: Syntheticoligonucleotide
  source 1..27: mol_type = other RNA
aacaatataatcaagtttattccttta

SEQ ID NO: 2700 - RNA, 27 nt, synthetic construct
  misc_feature 1..27: note = Description of Artificial Sequence: Syntheticoligonucleotide
  source 1..27: mol_type = other RNA
aaacaatataatcaagtttattccttt

SEQ ID NO: 2701 - RNA, 27 nt, synthetic construct
  misc_feature 1..27: note = Description of Artificial Sequence: Syntheticoligonucleotide
  source 1..27: mol_type = other RNA
aaaacaatataatcaagtttattcctt

SEQ ID NO: 2702 - RNA, 27 nt, synthetic construct
  misc_feature 1..27: note = Description of Artificial Sequence: Syntheticoligonucleotide
  source 1..27: mol_type = other RNA
aaaaacaatataatcaagtttattcct

SEQ ID NO: 2703 - RNA, 27 nt, synthetic construct
  misc_feature 1..27: note = Description of Artificial Sequence: Syntheticoligonucleotide
  source 1..27: mol_type = other RNA
aataaaaaaacaatataatcaagttta

SEQ ID NO: 2704 - RNA, 27 nt, synthetic construct
  misc_feature 1..27: note = Description of Artificial Sequence: Syntheticoligonucleotide
  source 1..27: mol_type = other RNA
aaataaaaaaacaatataatcaagttt

SEQ ID NO: 2705 - RNA, 27 nt, synthetic construct
  misc_feature 1..27: note = Description of Artificial Sequence: Syntheticoligonucleotide
  source 1..27: mol_type = other RNA
gccaaataaaaaaacaatataatcaag

SEQ ID NO: 2706 - RNA, 27 nt, synthetic construct
  misc_feature 1..27: note = Description of Artificial Sequence: Syntheticoligonucleotide
  source 1..27: mol_type = other RNA
gttatgccaaataaaaaaacaatataa

SEQ ID NO: 2707 - RNA, 27 nt, synthetic construct
  misc_feature 1..27: note = Description of Artificial Sequence: Syntheticoligonucleotide
  source 1..27: mol_type = other RNA
agttatgccaaataaaaaaacaatata

SEQ ID NO: 2708 - RNA, 27 nt, synthetic construct
  misc_feature 1..27: note = Description of Artificial Sequence: Syntheticoligonucleotide
  source 1..27: mol_type = other RNA
tcacagttatgccaaataaaaaaacaa

SEQ ID NO: 2709 - RNA, 27 nt, synthetic construct
  misc_feature 1..27: note = Description of Artificial Sequence: Syntheticoligonucleotide
  source 1..27: mol_type = other RNA
atcacagttatgccaaataaaaaaaca

SEQ ID NO: 2710 - RNA, 27 nt, synthetic construct
  misc_feature 1..27: note = Description of Artificial Sequence: Syntheticoligonucleotide
  source 1..27: mol_type = other RNA
tgtcctaaaagaatcacagttatgcca

SEQ ID NO: 2711 - RNA, 27 nt, synthetic construct
  misc_feature 1..27: note = Description of Artificial Sequence: Syntheticoligonucleotide
  source 1..27: mol_type = other RNA
gtaattgtcctaaaagaatcacagtta

SEQ ID NO: 2712 - RNA, 27 nt, synthetic construct
  misc_feature 1..27: note = Description of Artificial Sequence: Syntheticoligonucleotide
  source 1..27: mol_type = other RNA
agtaattgtcctaaaagaatcacagtt

SEQ ID NO: 2713 - RNA, 27 nt, synthetic construct
  misc_feature 1..27: note = Description of Artificial Sequence: Syntheticoligonucleotide
  source 1..27: mol_type = other RNA
tcaatatgaatatctgacatacacctt

SEQ ID NO: 2714 - RNA, 27 nt, synthetic construct
  misc_feature 1..27: note = Description of Artificial Sequence: Syntheticoligonucleotide
  source 1..27: mol_type = other RNA
gtcaatatgaatatctgacatacacct

SEQ ID NO: 2715 - RNA, 27 nt, synthetic construct
  misc_feature 1..27: note = Description of Artificial Sequence: Syntheticoligonucleotide
  source 1..27: mol_type = other RNA
agaaaactggaatattacacatttggg

SEQ ID NO: 2716 - RNA, 27 nt, synthetic construct
  misc_feature 1..27: note = Description of Artificial Sequence: Syntheticoligonucleotide
  source 1..27: mol_type = other RNA
tttaagtatattttaattacttatgca

SEQ ID NO: 2717 - RNA, 27 nt, synthetic construct
  misc_feature 1..27: note = Description of Artificial Sequence: Syntheticoligonucleotide
  source 1..27: mol_type = other RNA
ttttaagtatattttaattacttatgc

SEQ ID NO: 2718 - RNA, 27 nt, synthetic construct
  misc_feature 1..27: note = Description of Artificial Sequence: Syntheticoligonucleotide
  source 1..27: mol_type = other RNA
tttttaagtatattttaattacttatg

SEQ ID NO: 2719 - RNA, 27 nt, synthetic construct
  misc_feature 1..27: note = Description of Artificial Sequence: Syntheticoligonucleotide
  source 1..27: mol_type = other RNA
atttttaagtatattttaattacttat

SEQ ID NO: 2720 - RNA, 27 nt, synthetic construct
  misc_feature 1..27: note = Description of Artificial Sequence: Syntheticoligonucleotide
  source 1..27: mol_type = other RNA
aatttttaagtatattttaattactta

SEQ ID NO: 2721 - RNA, 27 nt, synthetic construct
  misc_feature 1..27: note = Description of Artificial Sequence: Syntheticoligonucleotide
  source 1..27: mol_type = other RNA
taatttttaagtatattttaattactt

SEQ ID NO: 2722 - RNA, 27 nt, synthetic construct
  misc_feature 1..27: note = Description of Artificial Sequence: Syntheticoligonucleotide
  source 1..27: mol_type = other RNA
ttaatttttaagtatattttaattact

SEQ ID NO: 2723 - RNA, 27 nt, synthetic construct
  misc_feature 1..27: note = Description of Artificial Sequence: Syntheticoligonucleotide
  source 1..27: mol_type = other RNA
attaatttttaagtatattttaattac

SEQ ID NO: 2724 - RNA, 27 nt, synthetic construct
  misc_feature 1..27: note = Description of Artificial Sequence: Syntheticoligonucleotide
  source 1..27: mol_type = other RNA
tattaatttttaagtatattttaatta

SEQ ID NO: 2725 - RNA, 27 nt, synthetic construct
  misc_feature 1..27: note = Description of Artificial Sequence: Syntheticoligonucleotide
  source 1..27: mol_type = other RNA
actattaatttttaagtatattttaat

SEQ ID NO: 2726 - RNA, 27 nt, synthetic construct
  misc_feature 1..27: note = Description of Artificial Sequence: Syntheticoligonucleotide
  source 1..27: mol_type = other RNA
aactattaatttttaagtatattttaa

SEQ ID NO: 2727 - RNA, 27 nt, synthetic construct
  misc_feature 1..27: note = Description of Artificial Sequence: Syntheticoligonucleotide
  source 1..27: mol_type = other RNA
aaactattaatttttaagtatatttta

SEQ ID NO: 2728 - RNA, 27 nt, synthetic construct
  misc_feature 1..27: note = Description of Artificial Sequence: Syntheticoligonucleotide
  source 1..27: mol_type = other RNA
aaaactattaatttttaagtatatttt

SEQ ID NO: 2729 - RNA, 27 nt, synthetic construct
  misc_feature 1..27: note = Description of Artificial Sequence: Syntheticoligonucleotide
  source 1..27: mol_type = other RNA
agataaaactattaatttttaagtata

SEQ ID NO: 2730 - RNA, 27 nt, synthetic construct
  misc_feature 1..27: note = Description of Artificial Sequence: Syntheticoligonucleotide
  source 1..27: mol_type = other RNA
acccagataaaactattaatttttaag

SEQ ID NO: 2731 - RNA, 27 nt, synthetic construct
  misc_feature 1..27: note = Description of Artificial Sequence: Syntheticoligonucleotide
  source 1..27: mol_type = other RNA
tacccagataaaactattaatttttaa

SEQ ID NO: 2732 - RNA, 27 nt, synthetic construct
  misc_feature 1..27: note = Description of Artificial Sequence: Syntheticoligonucleotide
  source 1..27: mol_type = other RNA
gtacccagataaaactattaattttta

SEQ ID NO: 2733 - RNA, 27 nt, synthetic construct
  misc_feature 1..27: note = Description of Artificial Sequence: Syntheticoligonucleotide
  source 1..27: mol_type = other RNA
ggcacctgtttatttgtacccagataa

SEQ ID NO: 2734 - RNA, 27 nt, synthetic construct
  misc_feature 1..27: note = Description of Artificial Sequence: Syntheticoligonucleotide
  source 1..27: mol_type = other RNA
atttttacatagaagtttccttgtctg

SEQ ID NO: 2735 - RNA, 27 nt, synthetic construct
  misc_feature 1..27: note = Description of Artificial Sequence: Syntheticoligonucleotide
  source 1..27: mol_type = other RNA
gatttttacatagaagtttccttgtct

SEQ ID NO: 2736 - RNA, 27 nt, synthetic construct
  misc_feature 1..27: note = Description of Artificial Sequence: Syntheticoligonucleotide
  source 1..27: mol_type = other RNA
tgatttttacatagaagtttccttgtc

SEQ ID NO: 2737 - RNA, 27 nt, synthetic construct
  misc_feature 1..27: note = Description of Artificial Sequence: Syntheticoligonucleotide
  source 1..27: mol_type = other RNA
aaatcatagtgatttttacatagaagt

SEQ ID NO: 2738 - RNA, 27 nt, synthetic construct
  misc_feature 1..27: note = Description of Artificial Sequence: Syntheticoligonucleotide
  source 1..27: mol_type = other RNA
gaaatcatagtgatttttacatagaag

SEQ ID NO: 2739 - RNA, 27 nt, synthetic construct
  misc_feature 1..27: note = Description of Artificial Sequence: Syntheticoligonucleotide
  source 1..27: mol_type = other RNA
agaaatcatagtgatttttacatagaa

SEQ ID NO: 2740 - RNA, 27 nt, synthetic construct
  misc_feature 1..27: note = Description of Artificial Sequence: Syntheticoligonucleotide
  source 1..27: mol_type = other RNA
attcagaaatcatagtgatttttacat

SEQ ID NO: 2741 - RNA, 27 nt, synthetic construct
  misc_feature 1..27: note = Description of Artificial Sequence: Syntheticoligonucleotide
  source 1..27: mol_type = other RNA
aattcagaaatcatagtgatttttaca

SEQ ID NO: 2742 - RNA, 27 nt, synthetic construct
  misc_feature 1..27: note = Description of Artificial Sequence: Syntheticoligonucleotide
  source 1..27: mol_type = other RNA
tcacatagcaattcagaaatcatagtg

SEQ ID NO: 2743 - RNA, 27 nt, synthetic construct
  misc_feature 1..27: note = Description of Artificial Sequence: Syntheticoligonucleotide
  source 1..27: mol_type = other RNA
ttcacatagcaattcagaaatcatagt

SEQ ID NO: 2744 - RNA, 27 nt, synthetic construct
  misc_feature 1..27: note = Description of Artificial Sequence: Syntheticoligonucleotide
  source 1..27: mol_type = other RNA
ttccaaagatctgtagtttcacatagc

SEQ ID NO: 2745 - RNA, 27 nt, synthetic construct
  misc_feature 1..27: note = Description of Artificial Sequence: Syntheticoligonucleotide
  source 1..27: mol_type = other RNA
gttccaaagatctgtagtttcacatag

SEQ ID NO: 2746 - RNA, 27 nt, synthetic construct
  misc_feature 1..27: note = Description of Artificial Sequence: Syntheticoligonucleotide
  source 1..27: mol_type = other RNA
ggtactgtgtaagtcttaacaccctac

SEQ ID NO: 2747 - RNA, 27 nt, synthetic construct
  misc_feature 1..27: note = Description of Artificial Sequence: Syntheticoligonucleotide
  source 1..27: mol_type = other RNA
acatcaaaaattcaagaggcctaaata

SEQ ID NO: 2748 - RNA, 27 nt, synthetic construct
  misc_feature 1..27: note = Description of Artificial Sequence: Syntheticoligonucleotide
  source 1..27: mol_type = other RNA
gcccatctacatcaaaaattcaagagg

SEQ ID NO: 2749 - RNA, 27 nt, synthetic construct
  misc_feature 1..27: note = Description of Artificial Sequence: Syntheticoligonucleotide
  source 1..27: mol_type = other RNA
tgcccatctacatcaaaaattcaagag

SEQ ID NO: 2750 - RNA, 27 nt, synthetic construct
  misc_feature 1..27: note = Description of Artificial Sequence: Syntheticoligonucleotide
  source 1..27: mol_type = other RNA
actaccttaaaaaaatgcccatctaca

SEQ ID NO: 2751 - RNA, 27 nt, synthetic construct
  misc_feature 1..27: note = Description of Artificial Sequence: Syntheticoligonucleotide
  source 1..27: mol_type = other RNA
ttaaccactaccttaaaaaaatgccca

SEQ ID NO: 2752 - RNA, 27 nt, synthetic construct
  misc_feature 1..27: note = Description of Artificial Sequence: Syntheticoligonucleotide
  source 1..27: mol_type = other RNA
acataaaggtaattaaccactacctta

SEQ ID NO: 2753 - RNA, 27 nt, synthetic construct
  misc_feature 1..27: note = Description of Artificial Sequence: Syntheticoligonucleotide
  source 1..27: mol_type = other RNA
tcacataaaggtaattaaccactacct

SEQ ID NO: 2754 - RNA, 27 nt, synthetic construct
  misc_feature 1..27: note = Description of Artificial Sequence: Syntheticoligonucleotide
  source 1..27: mol_type = other RNA
ttcacataaaggtaattaaccactacc

SEQ ID NO: 2755 - RNA, 27 nt, synthetic construct
  misc_feature 1..27: note = Description of Artificial Sequence: Syntheticoligonucleotide
  source 1..27: mol_type = other RNA
gttcacataaaggtaattaaccactac

SEQ ID NO: 2756 - RNA, 27 nt, synthetic construct
  misc_feature 1..27: note = Description of Artificial Sequence: Syntheticoligonucleotide
  source 1..27: mol_type = other RNA
agttcacataaaggtaattaaccacta

SEQ ID NO: 2757 - RNA, 27 nt, synthetic construct
  misc_feature 1..27: note = Description of Artificial Sequence: Syntheticoligonucleotide
  source 1..27: mol_type = other RNA
aaccattcaaagttcacataaaggtaa

SEQ ID NO: 2758 - RNA, 27 nt, synthetic construct
  misc_feature 1..27: note = Description of Artificial Sequence: Syntheticoligonucleotide
  source 1..27: mol_type = other RNA
tgttaaaccattcaaagttcacataaa

SEQ ID NO: 2759 - RNA, 27 nt, synthetic construct
  misc_feature 1..27: note = Description of Artificial Sequence: Syntheticoligonucleotide
  source 1..27: mol_type = other RNA
atcttttgttaaaccattcaaagttca

SEQ ID NO: 2760 - RNA, 27 nt, synthetic construct
  misc_feature 1..27: note = Description of Artificial Sequence: Syntheticoligonucleotide
  source 1..27: mol_type = other RNA
acaaatcttttgttaaaccattcaaag

SEQ ID NO: 2761 - RNA, 27 nt, synthetic construct
  misc_feature 1..27: note = Description of Artificial Sequence: Syntheticoligonucleotide
  source 1..27: mol_type = other RNA
aacaaatcttttgttaaaccattcaaa

SEQ ID NO: 2762 - RNA, 27 nt, synthetic construct
  misc_feature 1..27: note = Description of Artificial Sequence: Syntheticoligonucleotide
  source 1..27: mol_type = other RNA
aaacaaatcttttgttaaaccattcaa

SEQ ID NO: 2763 - RNA, 27 nt, synthetic construct
  misc_feature 1..27: note = Description of Artificial Sequence: Syntheticoligonucleotide
  source 1..27: mol_type = other RNA
aaaacaaatcttttgttaaaccattca

SEQ ID NO: 2764 - RNA, 27 nt, synthetic construct
  misc_feature 1..27: note = Description of Artificial Sequence: Syntheticoligonucleotide
  source 1..27: mol_type = other RNA
aaaaacaaatcttttgttaaaccattc

SEQ ID NO: 2765 - RNA, 27 nt, synthetic construct
  misc_feature 1..27: note = Description of Artificial Sequence: Syntheticoligonucleotide
  source 1..27: mol_type = other RNA
acaaaaacaaatcttttgttaaaccat

SEQ ID NO: 2766 - RNA, 27 nt, synthetic construct
  misc_feature 1..27: note = Description of Artificial Sequence: Syntheticoligonucleotide
  source 1..27: mol_type = other RNA
tacaaaaacaaatcttttgttaaacca

SEQ ID NO: 2767 - RNA, 27 nt, synthetic construct
  misc_feature 1..27: note = Description of Artificial Sequence: Syntheticoligonucleotide
  source 1..27: mol_type = other RNA
tctctacaaaaacaaatcttttgttaa

SEQ ID NO: 2768 - RNA, 27 nt, synthetic construct
  misc_feature 1..27: note = Description of Artificial Sequence: Syntheticoligonucleotide
  source 1..27: mol_type = other RNA
atctctacaaaaacaaatcttttgtta

SEQ ID NO: 2769 - RNA, 27 nt, synthetic construct
  misc_feature 1..27: note = Description of Artificial Sequence: Syntheticoligonucleotide
  source 1..27: mol_type = other RNA
aatctctacaaaaacaaatcttttgtt

SEQ ID NO: 2770 - RNA, 27 nt, synthetic construct
  misc_feature 1..27: note = Description of Artificial Sequence: Syntheticoligonucleotide
  source 1..27: mol_type = other RNA
aaaatctctacaaaaacaaatcttttg

SEQ ID NO: 2771 - RNA, 27 nt, synthetic construct
  misc_feature 1..27: note = Description of Artificial Sequence: Syntheticoligonucleotide
  source 1..27: mol_type = other RNA
taaaatctctacaaaaacaaatctttt

SEQ ID NO: 2772 - RNA, 27 nt, synthetic construct
  misc_feature 1..27: note = Description of Artificial Sequence: Syntheticoligonucleotide
  source 1..27: mol_type = other RNA
ttaaaatctctacaaaaacaaatcttt

SEQ ID NO: 2773 - RNA, 27 nt, synthetic construct
  misc_feature 1..27: note = Description of Artificial Sequence: Syntheticoligonucleotide
  source 1..27: mol_type = other RNA
tttaaaatctctacaaaaacaaatctt

SEQ ID NO: 2774 - RNA, 27 nt, synthetic construct
  misc_feature 1..27: note = Description of Artificial Sequence: Syntheticoligonucleotide
  source 1..27: mol_type = other RNA
tccccctttaaaatctctacaaaaaca

SEQ ID NO: 2775 - RNA, 27 nt, synthetic construct
  misc_feature 1..27: note = Description of Artificial Sequence: Syntheticoligonucleotide
  source 1..27: mol_type = other RNA
atttatttctagaattctcccccttta

SEQ ID NO: 2776 - RNA, 27 nt, synthetic construct
  misc_feature 1..27: note = Description of Artificial Sequence: Syntheticoligonucleotide
  source 1..27: mol_type = other RNA
acatttatttctagaattctccccctt

SEQ ID NO: 2777 - RNA, 27 nt, synthetic construct
  misc_feature 1..27: note = Description of Artificial Sequence: Syntheticoligonucleotide
  source 1..27: mol_type = other RNA
aacatttatttctagaattctccccct

SEQ ID NO: 2778 - RNA, 27 nt, synthetic construct
  misc_feature 1..27: note = Description of Artificial Sequence: Syntheticoligonucleotide
  source 1..27: mol_type = other RNA
taacatttatttctagaattctccccc

SEQ ID NO: 2779 - RNA, 27 nt, synthetic construct
  misc_feature 1..27: note = Description of Artificial Sequence: Syntheticoligonucleotide
  source 1..27: mol_type = other RNA
gtaacatttatttctagaattctcccc

SEQ ID NO: 2780 - RNA, 27 nt, synthetic construct
  misc_feature 1..27: note = Description of Artificial Sequence: Syntheticoligonucleotide
  source 1..27: mol_type = other RNA
ggtaacatttatttctagaattctccc

SEQ ID NO: 2781 - RNA, 27 nt, synthetic construct
  misc_feature 1..27: note = Description of Artificial Sequence: Syntheticoligonucleotide
  source 1..27: mol_type = other RNA
aattaggtaacatttatttctagaatt

SEQ ID NO: 2782 - RNA, 27 nt, synthetic construct
  misc_feature 1..27: note = Description of Artificial Sequence: Syntheticoligonucleotide
  source 1..27: mol_type = other RNA
taattaggtaacatttatttctagaat

SEQ ID NO: 2783 - RNA, 27 nt, synthetic construct
  misc_feature 1..27: note = Description of Artificial Sequence: Syntheticoligonucleotide
  source 1..27: mol_type = other RNA
ataattaggtaacatttatttctagaa

SEQ ID NO: 2784 - RNA, 27 nt, synthetic construct
  misc_feature 1..27: note = Description of Artificial Sequence: Syntheticoligonucleotide
  source 1..27: mol_type = other RNA
aataattaggtaacatttatttctaga

SEQ ID NO: 2785 - RNA, 27 nt, synthetic construct
  misc_feature 1..27: note = Description of Artificial Sequence: Syntheticoligonucleotide
  source 1..27: mol_type = other RNA
taataattaggtaacatttatttctag

SEQ ID NO: 2786 - RNA, 27 nt, synthetic construct
  misc_feature 1..27: note = Description of Artificial Sequence: Syntheticoligonucleotide
  source 1..27: mol_type = other RNA
tgtaataattaggtaacatttatttct

SEQ ID NO: 2787 - RNA, 27 nt, synthetic construct
  misc_feature 1..27: note = Description of Artificial Sequence: Syntheticoligonucleotide
  source 1..27: mol_type = other RNA
gtctttaaggctgtaataattaggtaa

SEQ ID NO: 2788 - RNA, 27 nt, synthetic construct
  misc_feature 1..27: note = Description of Artificial Sequence: Syntheticoligonucleotide
  source 1..27: mol_type = other RNA
tgtctttaaggctgtaataattaggta

SEQ ID NO: 2789 - RNA, 27 nt, synthetic construct
  misc_feature 1..27: note = Description of Artificial Sequence: Syntheticoligonucleotide
  source 1..27: mol_type = other RNA
tcaacaaggatttttgtctttaaggct

SEQ ID NO: 2790 - RNA, 27 nt, synthetic construct
  misc_feature 1..27: note = Description of Artificial Sequence: Syntheticoligonucleotide
  source 1..27: mol_type = other RNA
acttcaacaaggatttttgtctttaag

SEQ ID NO: 2791 - RNA, 27 nt, synthetic construct
  misc_feature 1..27: note = Description of Artificial Sequence: Syntheticoligonucleotide
  source 1..27: mol_type = other RNA
ttttttaaaaaaacttcaacaaggatt

SEQ ID NO: 2792 - RNA, 27 nt, synthetic construct
  misc_feature 1..27: note = Description of Artificial Sequence: Syntheticoligonucleotide
  source 1..27: mol_type = other RNA
tttttttaaaaaaacttcaacaaggat

SEQ ID NO: 2793 - RNA, 27 nt, synthetic construct
  misc_feature 1..27: note = Description of Artificial Sequence: Syntheticoligonucleotide
  source 1..27: mol_type = other RNA
gctttttttaaaaaaacttcaacaagg

SEQ ID NO: 2794 - RNA, 27 nt, synthetic construct
  misc_feature 1..27: note = Description of Artificial Sequence: Syntheticoligonucleotide
  source 1..27: mol_type = other RNA
agctttttttaaaaaaacttcaacaag

SEQ ID NO: 2795 - RNA, 27 nt, synthetic construct
  misc_feature 1..27: note = Description of Artificial Sequence: Syntheticoligonucleotide
  source 1..27: mol_type = other RNA
atttagctttttttaaaaaaacttcaa

SEQ ID NO: 2796 - RNA, 27 nt, synthetic construct
  misc_feature 1..27: note = Description of Artificial Sequence: Syntheticoligonucleotide
  source 1..27: mol_type = other RNA
aatttagctttttttaaaaaaacttca

SEQ ID NO: 2797 - RNA, 27 nt, synthetic construct
  misc_feature 1..27: note = Description of Artificial Sequence: Syntheticoligonucleotide
  source 1..27: mol_type = other RNA
taatttagctttttttaaaaaaacttc

SEQ ID NO: 2798 - RNA, 27 nt, synthetic construct
  misc_feature 1..27: note = Description of Artificial Sequence: Syntheticoligonucleotide
  source 1..27: mol_type = other RNA
gtaatttagctttttttaaaaaaactt

SEQ ID NO: 2799 - RNA, 27 nt, synthetic construct
  misc_feature 1..27: note = Description of Artificial Sequence: Syntheticoligonucleotide
  source 1..27: mol_type = other RNA
tgtaatttagctttttttaaaaaaact

SEQ ID NO: 2800 - RNA, 27 nt, synthetic construct
  misc_feature 1..27: note = Description of Artificial Sequence: Syntheticoligonucleotide
  source 1..27: mol_type = other RNA
tctatgtaatttagctttttttaaaaa

SEQ ID NO: 2801 - RNA, 27 nt, synthetic construct
  misc_feature 1..27: note = Description of Artificial Sequence: Syntheticoligonucleotide
  source 1..27: mol_type = other RNA
agtctatgtaatttagctttttttaaa

SEQ ID NO: 2802 - RNA, 27 nt, synthetic construct
  misc_feature 1..27: note = Description of Artificial Sequence: Syntheticoligonucleotide
  source 1..27: mol_type = other RNA
tccacaaacatgttaatgcctaagtct

SEQ ID NO: 2803 - RNA, 27 nt, synthetic construct
  misc_feature 1..27: note = Description of Artificial Sequence: Syntheticoligonucleotide
  source 1..27: mol_type = other RNA
ttccacaaacatgttaatgcctaagtc

SEQ ID NO: 2804 - RNA, 27 nt, synthetic construct
  misc_feature 1..27: note = Description of Artificial Sequence: Syntheticoligonucleotide
  source 1..27: mol_type = other RNA
tcaaatgatacaatatacgtctgctat

SEQ ID NO: 2805 - RNA, 27 nt, synthetic construct
  misc_feature 1..27: note = Description of Artificial Sequence: Syntheticoligonucleotide
  source 1..27: mol_type = other RNA
tcactcaaatgatacaatatacgtctg

SEQ ID NO: 2806 - RNA, 27 nt, synthetic construct
  misc_feature 1..27: note = Description of Artificial Sequence: Syntheticoligonucleotide
  source 1..27: mol_type = other RNA
attcactcaaatgatacaatatacgtc

SEQ ID NO: 2807 - RNA, 27 nt, synthetic construct
  misc_feature 1..27: note = Description of Artificial Sequence: Syntheticoligonucleotide
  source 1..27: mol_type = other RNA
aacattcactcaaatgatacaatatac

SEQ ID NO: 2808 - RNA, 27 nt, synthetic construct
  misc_feature 1..27: note = Description of Artificial Sequence: Syntheticoligonucleotide
  source 1..27: mol_type = other RNA
gaacattcactcaaatgatacaatata

SEQ ID NO: 2809 - RNA, 27 nt, synthetic construct
  misc_feature 1..27: note = Description of Artificial Sequence: Syntheticoligonucleotide
  source 1..27: mol_type = other RNA
ggaacattcactcaaatgatacaatat

SEQ ID NO: 2810 - RNA, 27 nt, synthetic construct
  misc_feature 1..27: note = Description of Artificial Sequence: Syntheticoligonucleotide
  source 1..27: mol_type = other RNA
taaaagttaggttctaaattcctatgc

SEQ ID NO: 2811 - RNA, 27 nt, synthetic construct
  misc_feature 1..27: note = Description of Artificial Sequence: Syntheticoligonucleotide
  source 1..27: mol_type = other RNA
ataaaagttaggttctaaattcctatg

SEQ ID NO: 2812 - RNA, 27 nt, synthetic construct
  misc_feature 1..27: note = Description of Artificial Sequence: Syntheticoligonucleotide
  source 1..27: mol_type = other RNA
acctataaaagttaggttctaaattcc

SEQ ID NO: 2813 - RNA, 27 nt, synthetic construct
  misc_feature 1..27: note = Description of Artificial Sequence: Syntheticoligonucleotide
  source 1..27: mol_type = other RNA
aacctataaaagttaggttctaaattc

SEQ ID NO: 2814 - RNA, 27 nt, synthetic construct
  misc_feature 1..27: note = Description of Artificial Sequence: Syntheticoligonucleotide
  source 1..27: mol_type = other RNA
taacctataaaagttaggttctaaatt

SEQ ID NO: 2815 - RNA, 27 nt, synthetic construct
  misc_feature 1..27: note = Description of Artificial Sequence: Syntheticoligonucleotide
  source 1..27: mol_type = other RNA
ataacctataaaagttaggttctaaat

SEQ ID NO: 2816 - RNA, 27 nt, synthetic construct
  misc_feature 1..27: note = Description of Artificial Sequence: Syntheticoligonucleotide
  source 1..27: mol_type = other RNA
acaacagttttgataacctataaaagt

SEQ ID NO: 2817 - RNA, 27 nt, synthetic construct
  misc_feature 1..27: note = Description of Artificial Sequence: Syntheticoligonucleotide
  source 1..27: mol_type = other RNA
tgacaacagttttgataacctataaaa

SEQ ID NO: 2818 - RNA, 27 nt, synthetic construct
  misc_feature 1..27: note = Description of Artificial Sequence: Syntheticoligonucleotide
  source 1..27: mol_type = other RNA
tctatgtatatattaggacaaaattgt

SEQ ID NO: 2819 - RNA, 27 nt, synthetic construct
  misc_feature 1..27: note = Description of Artificial Sequence: Syntheticoligonucleotide
  source 1..27: mol_type = other RNA
ttctatgtatatattaggacaaaattg

SEQ ID NO: 2820 - RNA, 27 nt, synthetic construct
  misc_feature 1..27: note = Description of Artificial Sequence: Syntheticoligonucleotide
  source 1..27: mol_type = other RNA
tttctatgtatatattaggacaaaatt

SEQ ID NO: 2821 - RNA, 27 nt, synthetic construct
  misc_feature 1..27: note = Description of Artificial Sequence: Syntheticoligonucleotide
  source 1..27: mol_type = other RNA
acaaagtttctatgtatatattaggac

SEQ ID NO: 2822 - RNA, 27 nt, synthetic construct
  misc_feature 1..27: note = Description of Artificial Sequence: Syntheticoligonucleotide
  source 1..27: mol_type = other RNA
gccccacaaagtttctatgtatatatt

SEQ ID NO: 2823 - RNA, 27 nt, synthetic construct
  misc_feature 1..27: note = Description of Artificial Sequence: Syntheticoligonucleotide
  source 1..27: mol_type = other RNA
ggaatacaaatgagatgaacttgtgca

SEQ ID NO: 2824 - RNA, 27 nt, synthetic construct
  misc_feature 1..27: note = Description of Artificial Sequence: Syntheticoligonucleotide
  source 1..27: mol_type = other RNA
aaaaaatcaatggaatacaaatgagat

SEQ ID NO: 2825 - RNA, 27 nt, synthetic construct
  misc_feature 1..27: note = Description of Artificial Sequence: Syntheticoligonucleotide
  source 1..27: mol_type = other RNA
aaaaaaatcaatggaatacaaatgaga

SEQ ID NO: 2826 - RNA, 27 nt, synthetic construct
  misc_feature 1..27: note = Description of Artificial Sequence: Syntheticoligonucleotide
  source 1..27: mol_type = other RNA
aaaaaaaatcaatggaatacaaatgag

SEQ ID NO: 2827 - RNA, 27 nt, synthetic construct
  misc_feature 1..27: note = Description of Artificial Sequence: Syntheticoligonucleotide
  source 1..27: mol_type = other RNA
aaaaaaaaatcaatggaatacaaatga

SEQ ID NO: 2828 - RNA, 27 nt, synthetic construct
  misc_feature 1..27: note = Description of Artificial Sequence: Syntheticoligonucleotide
  source 1..27: mol_type = other RNA
aaaaaaaaaatcaatggaatacaaatg

SEQ ID NO: 2829 - RNA, 27 nt, synthetic construct
  misc_feature 1..27: note = Description of Artificial Sequence: Syntheticoligonucleotide
  source 1..27: mol_type = other RNA
gaaaaaaaaaatcaatggaatacaaat

SEQ ID NO: 2830 - RNA, 27 nt, synthetic construct
  misc_feature 1..27: note = Description of Artificial Sequence: Syntheticoligonucleotide
  source 1..27: mol_type = other RNA
agaaaaaaaaaatcaatggaatacaaa

SEQ ID NO: 2831 - RNA, 27 nt, synthetic construct
  misc_feature 1..27: note = Description of Artificial Sequence: Syntheticoligonucleotide
  source 1..27: mol_type = other RNA
gtttagaagaaaaaaaaaatcaatgga

SEQ ID NO: 2832 - RNA, 27 nt, synthetic construct
  misc_feature 1..27: note = Description of Artificial Sequence: Syntheticoligonucleotide
  source 1..27: mol_type = other RNA
tgtttagaagaaaaaaaaaatcaatgg

SEQ ID NO: 2833 - RNA, 27 nt, synthetic construct
  misc_feature 1..27: note = Description of Artificial Sequence: Syntheticoligonucleotide
  source 1..27: mol_type = other RNA
aaaatgtttagaagaaaaaaaaaatca

SEQ ID NO: 2834 - RNA, 27 nt, synthetic construct
  misc_feature 1..27: note = Description of Artificial Sequence: Syntheticoligonucleotide
  source 1..27: mol_type = other RNA
aaaaatgtttagaagaaaaaaaaaatc

SEQ ID NO: 2835 - RNA, 27 nt, synthetic construct
  misc_feature 1..27: note = Description of Artificial Sequence: Syntheticoligonucleotide
  source 1..27: mol_type = other RNA
aaaaaatgtttagaagaaaaaaaaaat

SEQ ID NO: 2836 - RNA, 27 nt, synthetic construct
  misc_feature 1..27: note = Description of Artificial Sequence: Syntheticoligonucleotide
  source 1..27: mol_type = other RNA
gaaaaaatgtttagaagaaaaaaaaaa

SEQ ID NO: 2837 - RNA, 27 nt, synthetic construct
  misc_feature 1..27: note = Description of Artificial Sequence: Syntheticoligonucleotide
  source 1..27: mol_type = other RNA
agaaaaaatgtttagaagaaaaaaaaa

SEQ ID NO: 2838 - RNA, 27 nt, synthetic construct
  misc_feature 1..27: note = Description of Artificial Sequence: Syntheticoligonucleotide
  source 1..27: mol_type = other RNA
atatactgtttgaagaaaaaatgttta

SEQ ID NO: 2839 - RNA, 27 nt, synthetic construct
  misc_feature 1..27: note = Description of Artificial Sequence: Syntheticoligonucleotide
  source 1..27: mol_type = other RNA
tatatactgtttgaagaaaaaatgttt

SEQ ID NO: 2840 - RNA, 27 nt, synthetic construct
  misc_feature 1..27: note = Description of Artificial Sequence: Syntheticoligonucleotide
  source 1..27: mol_type = other RNA
ttatatactgtttgaagaaaaaatgtt

SEQ ID NO: 2841 - RNA, 27 nt, synthetic construct
  misc_feature 1..27: note = Description of Artificial Sequence: Syntheticoligonucleotide
  source 1..27: mol_type = other RNA
gttatatactgtttgaagaaaaaatgt

SEQ ID NO: 2842 - RNA, 27 nt, synthetic construct
  misc_feature 1..27: note = Description of Artificial Sequence: Syntheticoligonucleotide
  source 1..27: mol_type = other RNA
agttatatactgtttgaagaaaaaatg

SEQ ID NO: 2843 - RNA, 27 nt, synthetic construct
  misc_feature 1..27: note = Description of Artificial Sequence: Syntheticoligonucleotide
  source 1..27: mol_type = other RNA
taaaaaaagttatatactgtttgaaga

SEQ ID NO: 2844 - RNA, 27 nt, synthetic construct
  misc_feature 1..27: note = Description of Artificial Sequence: Syntheticoligonucleotide
  source 1..27: mol_type = other RNA
tcccctaaaaaaagttatatactgttt

SEQ ID NO: 2845 - RNA, 27 nt, synthetic construct
  misc_feature 1..27: note = Description of Artificial Sequence: Syntheticoligonucleotide
  source 1..27: mol_type = other RNA
atcccctaaaaaaagttatatactgtt

SEQ ID NO: 2846 - RNA, 27 nt, synthetic construct
  misc_feature 1..27: note = Description of Artificial Sequence: Syntheticoligonucleotide
  source 1..27: mol_type = other RNA
aatcccctaaaaaaagttatatactgt

SEQ ID NO: 2847 - RNA, 27 nt, synthetic construct
  misc_feature 1..27: note = Description of Artificial Sequence: Syntheticoligonucleotide
  source 1..27: mol_type = other RNA
aaatcccctaaaaaaagttatatactg

SEQ ID NO: 2848 - RNA, 27 nt, synthetic construct
  misc_feature 1..27: note = Description of Artificial Sequence: Syntheticoligonucleotide
  source 1..27: mol_type = other RNA
aaaaaaaaatcccctaaaaaaagttat

SEQ ID NO: 2849 - RNA, 27 nt, synthetic construct
  misc_feature 1..27: note = Description of Artificial Sequence: Syntheticoligonucleotide
  source 1..27: mol_type = other RNA
taaaaaaaaatcccctaaaaaaagtta

SEQ ID NO: 2850 - RNA, 27 nt, synthetic construct
  misc_feature 1..27: note = Description of Artificial Sequence: Syntheticoligonucleotide
  source 1..27: mol_type = other RNA
tttttgctgtctaaaaaaaaatcccct

SEQ ID NO: 2851 - RNA, 27 nt, synthetic construct
  misc_feature 1..27: note = Description of Artificial Sequence: Syntheticoligonucleotide
  source 1..27: mol_type = other RNA
gtttttgctgtctaaaaaaaaatcccc

SEQ ID NO: 2852 - RNA, 27 nt, synthetic construct
  misc_feature 1..27: note = Description of Artificial Sequence: Syntheticoligonucleotide
  source 1..27: mol_type = other RNA
agtttttgctgtctaaaaaaaaatccc

SEQ ID NO: 2853 - RNA, 27 nt, synthetic construct
  misc_feature 1..27: note = Description of Artificial Sequence: Syntheticoligonucleotide
  source 1..27: mol_type = other RNA
actttttgacaaatggaaatcttcaga

SEQ ID NO: 2854 - RNA, 27 nt, synthetic construct
  misc_feature 1..27: note = Description of Artificial Sequence: Syntheticoligonucleotide
  source 1..27: mol_type = other RNA
tactttttgacaaatggaaatcttcag

SEQ ID NO: 2855 - RNA, 27 nt, synthetic construct
  misc_feature 1..27: note = Description of Artificial Sequence: Syntheticoligonucleotide
  source 1..27: mol_type = other RNA
ttactttttgacaaatggaaatcttca

SEQ ID NO: 2856 - RNA, 27 nt, synthetic construct
  misc_feature 1..27: note = Description of Artificial Sequence: Syntheticoligonucleotide
  source 1..27: mol_type = other RNA
attactttttgacaaatggaaatcttc

SEQ ID NO: 2857 - RNA, 27 nt, synthetic construct
  misc_feature 1..27: note = Description of Artificial Sequence: Syntheticoligonucleotide
  source 1..27: mol_type = other RNA
aaatcattactttttgacaaatggaaa

SEQ ID NO: 2858 - RNA, 27 nt, synthetic construct
  misc_feature 1..27: note = Description of Artificial Sequence: Syntheticoligonucleotide
  source 1..27: mol_type = other RNA
gaaatcattactttttgacaaatggaa

SEQ ID NO: 2859 - RNA, 27 nt, synthetic construct
  misc_feature 1..27: note = Description of Artificial Sequence: Syntheticoligonucleotide
  source 1..27: mol_type = other RNA
agaaatcattactttttgacaaatgga

SEQ ID NO: 2860 - RNA, 27 nt, synthetic construct
  misc_feature 1..27: note = Description of Artificial Sequence: Syntheticoligonucleotide
  source 1..27: mol_type = other RNA
tatcaagaaatcattactttttgacaa

SEQ ID NO: 2861 - RNA, 27 nt, synthetic construct
  misc_feature 1..27: note = Description of Artificial Sequence: Syntheticoligonucleotide
  source 1..27: mol_type = other RNA
ttatcaagaaatcattactttttgaca

SEQ ID NO: 2862 - RNA, 27 nt, synthetic construct
  misc_feature 1..27: note = Description of Artificial Sequence: Syntheticoligonucleotide
  source 1..27: mol_type = other RNA
attatcaagaaatcattactttttgac

SEQ ID NO: 2863 - RNA, 27 nt, synthetic construct
  misc_feature 1..27: note = Description of Artificial Sequence: Syntheticoligonucleotide
  source 1..27: mol_type = other RNA
aattatcaagaaatcattactttttga

SEQ ID NO: 2864 - RNA, 27 nt, synthetic construct
  misc_feature 1..27: note = Description of Artificial Sequence: Syntheticoligonucleotide
  source 1..27: mol_type = other RNA
acaattatcaagaaatcattacttttt

SEQ ID NO: 2865 - RNA, 27 nt, synthetic construct
  misc_feature 1..27: note = Description of Artificial Sequence: Syntheticoligonucleotide
  source 1..27: mol_type = other RNA
acacaattatcaagaaatcattacttt

SEQ ID NO: 2866 - RNA, 27 nt, synthetic construct
  misc_feature 1..27: note = Description of Artificial Sequence: Syntheticoligonucleotide
  source 1..27: mol_type = other RNA
tacacaattatcaagaaatcattactt

SEQ ID NO: 2867 - RNA, 27 nt, synthetic construct
  misc_feature 1..27: note = Description of Artificial Sequence: Syntheticoligonucleotide
  source 1..27: mol_type = other RNA
actacacaattatcaagaaatcattac

SEQ ID NO: 2868 - RNA, 27 nt, synthetic construct
  misc_feature 1..27: note = Description of Artificial Sequence: Syntheticoligonucleotide
  source 1..27: mol_type = other RNA
tactacacaattatcaagaaatcatta

SEQ ID NO: 2869 - RNA, 27 nt, synthetic construct
  misc_feature 1..27: note = Description of Artificial Sequence: Syntheticoligonucleotide
  source 1..27: mol_type = other RNA
aacattactacacaattatcaagaaat

SEQ ID NO: 2870 - RNA, 27 nt, synthetic construct
  misc_feature 1..27: note = Description of Artificial Sequence: Syntheticoligonucleotide
  source 1..27: mol_type = other RNA
aaacattactacacaattatcaagaaa

SEQ ID NO: 2871 - RNA, 27 nt, synthetic construct
  misc_feature 1..27: note = Description of Artificial Sequence: Syntheticoligonucleotide
  source 1..27: mol_type = other RNA
aaaacattactacacaattatcaagaa

SEQ ID NO: 2872 - RNA, 27 nt, synthetic construct
  misc_feature 1..27: note = Description of Artificial Sequence: Syntheticoligonucleotide
  source 1..27: mol_type = other RNA
aaaaaacattactacacaattatcaag

SEQ ID NO: 2873 - RNA, 27 nt, synthetic construct
  misc_feature 1..27: note = Description of Artificial Sequence: Syntheticoligonucleotide
  source 1..27: mol_type = other RNA
tctaaaaaacattactacacaattatc

SEQ ID NO: 2874 - RNA, 27 nt, synthetic construct
  misc_feature 1..27: note = Description of Artificial Sequence: Syntheticoligonucleotide
  source 1..27: mol_type = other RNA
gttctaaaaaacattactacacaatta

SEQ ID NO: 2875 - RNA, 27 nt, synthetic construct
  misc_feature 1..27: note = Description of Artificial Sequence: Syntheticoligonucleotide
  source 1..27: mol_type = other RNA
ggttctaaaaaacattactacacaatt

SEQ ID NO: 2876 - RNA, 27 nt, synthetic construct
  misc_feature 1..27: note = Description of Artificial Sequence: Syntheticoligonucleotide
  source 1..27: mol_type = other RNA
actaaatataaattcagctttaaggta

SEQ ID NO: 2877 - RNA, 27 nt, synthetic construct
  misc_feature 1..27: note = Description of Artificial Sequence: Syntheticoligonucleotide
  source 1..27: mol_type = other RNA
ttactaaatataaattcagctttaagg

SEQ ID NO: 2878 - RNA, 27 nt, synthetic construct
  misc_feature 1..27: note = Description of Artificial Sequence: Syntheticoligonucleotide
  source 1..27: mol_type = other RNA
acacagaagttactaaatataaattca

SEQ ID NO: 2879 - RNA, 27 nt, synthetic construct
  misc_feature 1..27: note = Description of Artificial Sequence: Syntheticoligonucleotide
  source 1..27: mol_type = other RNA
aacacagaagttactaaatataaattc

SEQ ID NO: 2880 - RNA, 27 nt, synthetic construct
  misc_feature 1..27: note = Description of Artificial Sequence: Syntheticoligonucleotide
  source 1..27: mol_type = other RNA
taacacagaagttactaaatataaatt

SEQ ID NO: 2881 - RNA, 27 nt, synthetic construct
  misc_feature 1..27: note = Description of Artificial Sequence: Syntheticoligonucleotide
  source 1..27: mol_type = other RNA
agtattaacacagaagttactaaatat

SEQ ID NO: 2882 - RNA, 27 nt, synthetic construct
  misc_feature 1..27: note = Description of Artificial Sequence: Syntheticoligonucleotide
  source 1..27: mol_type = other RNA
tttcattttatgacagctattcagttt

SEQ ID NO: 2883 - RNA, 27 nt, synthetic construct
  misc_feature 1..27: note = Description of Artificial Sequence: Syntheticoligonucleotide
  source 1..27: mol_type = other RNA
gtttcattttatgacagctattcagtt

SEQ ID NO: 2884 - RNA, 27 nt, synthetic construct
  misc_feature 1..27: note = Description of Artificial Sequence: Syntheticoligonucleotide
  source 1..27: mol_type = other RNA
tctttagaaagaaagtttcattttatg

SEQ ID NO: 2885 - RNA, 27 nt, synthetic construct
  misc_feature 1..27: note = Description of Artificial Sequence: Syntheticoligonucleotide
  source 1..27: mol_type = other RNA
ttctttagaaagaaagtttcattttat

SEQ ID NO: 2886 - RNA, 27 nt, synthetic construct
  misc_feature 1..27: note = Description of Artificial Sequence: Syntheticoligonucleotide
  source 1..27: mol_type = other RNA
tttctttagaaagaaagtttcatttta

SEQ ID NO: 2887 - RNA, 27 nt, synthetic construct
  misc_feature 1..27: note = Description of Artificial Sequence: Syntheticoligonucleotide
  source 1..27: mol_type = other RNA
tctttctttagaaagaaagtttcattt

SEQ ID NO: 2888 - RNA, 27 nt, synthetic construct
  misc_feature 1..27: note = Description of Artificial Sequence: Syntheticoligonucleotide
  source 1..27: mol_type = other RNA
agtatctttctttagaaagaaagtttc

SEQ ID NO: 2889 - RNA, 27 nt, synthetic construct
  misc_feature 1..27: note = Description of Artificial Sequence: Syntheticoligonucleotide
  source 1..27: mol_type = other RNA
tgactattcttcaagaactcatgtgag

SEQ ID NO: 2890 - RNA, 27 nt, synthetic construct
  misc_feature 1..27: note = Description of Artificial Sequence: Syntheticoligonucleotide
  source 1..27: mol_type = other RNA
atctagttatgactattcttcaagaac

SEQ ID NO: 2891 - RNA, 27 nt, synthetic construct
  misc_feature 1..27: note = Description of Artificial Sequence: Syntheticoligonucleotide
  source 1..27: mol_type = other RNA
aatctagttatgactattcttcaagaa

SEQ ID NO: 2892 - RNA, 27 nt, synthetic construct
  misc_feature 1..27: note = Description of Artificial Sequence: Syntheticoligonucleotide
  source 1..27: mol_type = other RNA
taatctagttatgactattcttcaaga

SEQ ID NO: 2893 - RNA, 27 nt, synthetic construct
  misc_feature 1..27: note = Description of Artificial Sequence: Syntheticoligonucleotide
  source 1..27: mol_type = other RNA
tcttaatctagttatgactattcttca

SEQ ID NO: 2894 - RNA, 27 nt, synthetic construct
  misc_feature 1..27: note = Description of Artificial Sequence: Syntheticoligonucleotide
  source 1..27: mol_type = other RNA
atcttaatctagttatgactattcttc

SEQ ID NO: 2895 - RNA, 27 nt, synthetic construct
  misc_feature 1..27: note = Description of Artificial Sequence: Syntheticoligonucleotide
  source 1..27: mol_type = other RNA
gatcttaatctagttatgactattctt

SEQ ID NO: 2896 - RNA, 27 nt, synthetic construct
  misc_feature 1..27: note = Description of Artificial Sequence: Syntheticoligonucleotide
  source 1..27: mol_type = other RNA
agatcttaatctagttatgactattct

SEQ ID NO: 2897 - RNA, 27 nt, synthetic construct
  misc_feature 1..27: note = Description of Artificial Sequence: Syntheticoligonucleotide
  source 1..27: mol_type = other RNA
acacagatcttaatctagttatgacta

SEQ ID NO: 2898 - RNA, 27 nt, synthetic construct
  misc_feature 1..27: note = Description of Artificial Sequence: Syntheticoligonucleotide
  source 1..27: mol_type = other RNA
actaaaacacagatcttaatctagtta

SEQ ID NO: 2899 - RNA, 27 nt, synthetic construct
  misc_feature 1..27: note = Description of Artificial Sequence: Syntheticoligonucleotide
  source 1..27: mol_type = other RNA
aaactaaaacacagatcttaatctagt

SEQ ID NO: 2900 - RNA, 27 nt, synthetic construct
  misc_feature 1..27: note = Description of Artificial Sequence: Syntheticoligonucleotide
  source 1..27: mol_type = other RNA
taaactaaaacacagatcttaatctag

SEQ ID NO: 2901 - RNA, 27 nt, synthetic construct
  misc_feature 1..27: note = Description of Artificial Sequence: Syntheticoligonucleotide
  source 1..27: mol_type = other RNA
attaaactaaaacacagatcttaatct

SEQ ID NO: 2902 - RNA, 27 nt, synthetic construct
  misc_feature 1..27: note = Description of Artificial Sequence: Syntheticoligonucleotide
  source 1..27: mol_type = other RNA
tcaaactattaaactaaaacacagatc

SEQ ID NO: 2903 - RNA, 27 nt, synthetic construct
  misc_feature 1..27: note = Description of Artificial Sequence: Syntheticoligonucleotide
  source 1..27: mol_type = other RNA
ttcaaactattaaactaaaacacagat

SEQ ID NO: 2904 - RNA, 27 nt, synthetic construct
  misc_feature 1..27: note = Description of Artificial Sequence: Syntheticoligonucleotide
  source 1..27: mol_type = other RNA
acttcaaactattaaactaaaacacag

SEQ ID NO: 2905 - RNA, 27 nt, synthetic construct
  misc_feature 1..27: note = Description of Artificial Sequence: Syntheticoligonucleotide
  source 1..27: mol_type = other RNA
gcacttcaaactattaaactaaaacac

SEQ ID NO: 2906 - RNA, 27 nt, synthetic construct
  misc_feature 1..27: note = Description of Artificial Sequence: Syntheticoligonucleotide
  source 1..27: mol_type = other RNA
ggcacttcaaactattaaactaaaaca

SEQ ID NO: 2907 - RNA, 27 nt, synthetic construct
  misc_feature 1..27: note = Description of Artificial Sequence: Syntheticoligonucleotide
  source 1..27: mol_type = other RNA
taaattacctatcattatcccaaacag

SEQ ID NO: 2908 - RNA, 27 nt, synthetic construct
  misc_feature 1..27: note = Description of Artificial Sequence: Syntheticoligonucleotide
  source 1..27: mol_type = other RNA
tctaaattacctatcattatcccaaac

SEQ ID NO: 2909 - RNA, 27 nt, synthetic construct
  misc_feature 1..27: note = Description of Artificial Sequence: Syntheticoligonucleotide
  source 1..27: mol_type = other RNA
tcatctaaattacctatcattatccca

SEQ ID NO: 2910 - RNA, 27 nt, synthetic construct
  misc_feature 1..27: note = Description of Artificial Sequence: Syntheticoligonucleotide
  source 1..27: mol_type = other RNA
ttcatctaaattacctatcattatccc

SEQ ID NO: 2911 - RNA, 27 nt, synthetic construct
  misc_feature 1..27: note = Description of Artificial Sequence: Syntheticoligonucleotide
  source 1..27: mol_type = other RNA
aaattcatctaaattacctatcattat

SEQ ID NO: 2912 - RNA, 27 nt, synthetic construct
  misc_feature 1..27: note = Description of Artificial Sequence: Syntheticoligonucleotide
  source 1..27: mol_type = other RNA
taaattcatctaaattacctatcatta

SEQ ID NO: 2913 - RNA, 27 nt, synthetic construct
  misc_feature 1..27: note = Description of Artificial Sequence: Syntheticoligonucleotide
  source 1..27: mol_type = other RNA
tcccctaaattcatctaaattacctat

SEQ ID NO: 2914 - RNA, 27 nt, synthetic construct
  misc_feature 1..27: note = Description of Artificial Sequence: Syntheticoligonucleotide
  source 1..27: mol_type = other RNA
tttcccctaaattcatctaaattacct

SEQ ID NO: 2915 - RNA, 27 nt, synthetic construct
  misc_feature 1..27: note = Description of Artificial Sequence: Syntheticoligonucleotide
  source 1..27: mol_type = other RNA
acttttttttcccctaaattcatctaa

SEQ ID NO: 2916 - RNA, 27 nt, synthetic construct
  misc_feature 1..27: note = Description of Artificial Sequence: Syntheticoligonucleotide
  source 1..27: mol_type = other RNA
aacttttttttcccctaaattcatcta

SEQ ID NO: 2917 - RNA, 27 nt, synthetic construct
  misc_feature 1..27: note = Description of Artificial Sequence: Syntheticoligonucleotide
  source 1..27: mol_type = other RNA
tatctgcagataacttttttttcccct

SEQ ID NO: 2918 - RNA, 27 nt, synthetic construct
  misc_feature 1..27: note = Description of Artificial Sequence: Syntheticoligonucleotide
  source 1..27: mol_type = other RNA
atatctgcagataacttttttttcccc

SEQ ID NO: 2919 - RNA, 27 nt, synthetic construct
  misc_feature 1..27: note = Description of Artificial Sequence: Syntheticoligonucleotide
  source 1..27: mol_type = other RNA
tcaacatatctgcagataacttttttt

SEQ ID NO: 2920 - RNA, 27 nt, synthetic construct
  misc_feature 1..27: note = Description of Artificial Sequence: Syntheticoligonucleotide
  source 1..27: mol_type = other RNA
tattttcaacatgaaaacacaagacag

SEQ ID NO: 2921 - RNA, 27 nt, synthetic construct
  misc_feature 1..27: note = Description of Artificial Sequence: Syntheticoligonucleotide
  source 1..27: mol_type = other RNA
gtattttcaacatgaaaacacaagaca

SEQ ID NO: 2922 - RNA, 27 nt, synthetic construct
  misc_feature 1..27: note = Description of Artificial Sequence: Syntheticoligonucleotide
  source 1..27: mol_type = other RNA
agtattttcaacatgaaaacacaagac

SEQ ID NO: 2923 - RNA, 27 nt, synthetic construct
  misc_feature 1..27: note = Description of Artificial Sequence: Syntheticoligonucleotide
  source 1..27: mol_type = other RNA
aaaatgcaaaagtattttcaacatgaa

SEQ ID NO: 2924 - RNA, 27 nt, synthetic construct
  misc_feature 1..27: note = Description of Artificial Sequence: Syntheticoligonucleotide
  source 1..27: mol_type = other RNA
aaaaatgcaaaagtattttcaacatga

SEQ ID NO: 2925 - RNA, 27 nt, synthetic construct
  misc_feature 1..27: note = Description of Artificial Sequence: Syntheticoligonucleotide
  source 1..27: mol_type = other RNA
gaaaaatgcaaaagtattttcaacatg

SEQ ID NO: 2926 - RNA, 27 nt, synthetic construct
  misc_feature 1..27: note = Description of Artificial Sequence: Syntheticoligonucleotide
  source 1..27: mol_type = other RNA
ggaaaaatgcaaaagtattttcaacat

SEQ ID NO: 2927 - RNA, 27 nt, synthetic construct
  misc_feature 1..27: note = Description of Artificial Sequence: Syntheticoligonucleotide
  source 1..27: mol_type = other RNA
ggcactcaaaggaaaaatgcaaaagta

SEQ ID NO: 2928 - RNA, 27 nt, synthetic construct
  misc_feature 1..27: note = Description of Artificial Sequence: Syntheticoligonucleotide
  source 1..27: mol_type = other RNA
agtactagtaagaaattggcactcaaa

SEQ ID NO: 2929 - RNA, 27 nt, synthetic construct
  misc_feature 1..27: note = Description of Artificial Sequence: Syntheticoligonucleotide
  source 1..27: mol_type = other RNA
gaaatagtactagtaagaaattggcac

SEQ ID NO: 2930 - RNA, 27 nt, synthetic construct
  misc_feature 1..27: note = Description of Artificial Sequence: Syntheticoligonucleotide
  source 1..27: mol_type = other RNA
agaaatagtactagtaagaaattggca

SEQ ID NO: 2931 - RNA, 27 nt, synthetic construct
  misc_feature 1..27: note = Description of Artificial Sequence: Syntheticoligonucleotide
  source 1..27: mol_type = other RNA
gttacattaagaaatagtactagtaag

SEQ ID NO: 2932 - RNA, 27 nt, synthetic construct
  misc_feature 1..27: note = Description of Artificial Sequence: Syntheticoligonucleotide
  source 1..27: mol_type = other RNA
tgttacattaagaaatagtactagtaa

SEQ ID NO: 2933 - RNA, 27 nt, synthetic construct
  misc_feature 1..27: note = Description of Artificial Sequence: Syntheticoligonucleotide
  source 1..27: mol_type = other RNA
aaacatgttacattaagaaatagtact

SEQ ID NO: 2934 - RNA, 27 nt, synthetic construct
  misc_feature 1..27: note = Description of Artificial Sequence: Syntheticoligonucleotide
  source 1..27: mol_type = other RNA
taaacatgttacattaagaaatagtac

SEQ ID NO: 2935 - RNA, 27 nt, synthetic construct
  misc_feature 1..27: note = Description of Artificial Sequence: Syntheticoligonucleotide
  source 1..27: mol_type = other RNA
gtaaacatgttacattaagaaatagta

SEQ ID NO: 2936 - RNA, 27 nt, synthetic construct
  misc_feature 1..27: note = Description of Artificial Sequence: Syntheticoligonucleotide
  source 1..27: mol_type = other RNA
attccaggtaaacatgttacattaaga

SEQ ID NO: 2937 - RNA, 27 nt, synthetic construct
  misc_feature 1..27: note = Description of Artificial Sequence: Syntheticoligonucleotide
  source 1..27: mol_type = other RNA
aaaaatagttaaaatacattccaggta

SEQ ID NO: 2938 - RNA, 27 nt, synthetic construct
  misc_feature 1..27: note = Description of Artificial Sequence: Syntheticoligonucleotide
  source 1..27: mol_type = other RNA
acaaaaatagttaaaatacattccagg

SEQ ID NO: 2939 - RNA, 27 nt, synthetic construct
  misc_feature 1..27: note = Description of Artificial Sequence: Syntheticoligonucleotide
  source 1..27: mol_type = other RNA
tacaaaaatagttaaaatacattccag

SEQ ID NO: 2940 - RNA, 27 nt, synthetic construct
  misc_feature 1..27: note = Description of Artificial Sequence: Syntheticoligonucleotide
  source 1..27: mol_type = other RNA
atacaaaaatagttaaaatacattcca

SEQ ID NO: 2941 - RNA, 27 nt, synthetic construct
  misc_feature 1..27: note = Description of Artificial Sequence: Syntheticoligonucleotide
  source 1..27: mol_type = other RNA
tatacaaaaatagttaaaatacattcc

SEQ ID NO: 2942 - RNA, 27 nt, synthetic construct
  misc_feature 1..27: note = Description of Artificial Sequence: Syntheticoligonucleotide
  source 1..27: mol_type = other RNA
actatacaaaaatagttaaaatacatt

SEQ ID NO: 2943 - RNA, 27 nt, synthetic construct
  misc_feature 1..27: note = Description of Artificial Sequence: Syntheticoligonucleotide
  source 1..27: mol_type = other RNA
acactatacaaaaatagttaaaataca

SEQ ID NO: 2944 - RNA, 27 nt, synthetic construct
  misc_feature 1..27: note = Description of Artificial Sequence: Syntheticoligonucleotide
  source 1..27: mol_type = other RNA
tacactatacaaaaatagttaaaatac

SEQ ID NO: 2945 - RNA, 27 nt, synthetic construct
  misc_feature 1..27: note = Description of Artificial Sequence: Syntheticoligonucleotide
  source 1..27: mol_type = other RNA
ttacactatacaaaaatagttaaaata

SEQ ID NO: 2946 - RNA, 27 nt, synthetic construct
  misc_feature 1..27: note = Description of Artificial Sequence: Syntheticoligonucleotide
  source 1..27: mol_type = other RNA
tttcagtttacactatacaaaaatagt

SEQ ID NO: 2947 - RNA, 27 nt, synthetic construct
  misc_feature 1..27: note = Description of Artificial Sequence: Syntheticoligonucleotide
  source 1..27: mol_type = other RNA
gtttcagtttacactatacaaaaatag

SEQ ID NO: 2948 - RNA, 27 nt, synthetic construct
  misc_feature 1..27: note = Description of Artificial Sequence: Syntheticoligonucleotide
  source 1..27: mol_type = other RNA
tgtttcagtttacactatacaaaaata

SEQ ID NO: 2949 - RNA, 27 nt, synthetic construct
  misc_feature 1..27: note = Description of Artificial Sequence: Syntheticoligonucleotide
  source 1..27: mol_type = other RNA
tgtacaaaatgtgcatgtttcagttta

SEQ ID NO: 2950 - RNA, 27 nt, synthetic construct
  misc_feature 1..27: note = Description of Artificial Sequence: Syntheticoligonucleotide
  source 1..27: mol_type = other RNA
gcacaatgtacaaaatgtgcatgtttc

SEQ ID NO: 2951 - RNA, 27 nt, synthetic construct
  misc_feature 1..27: note = Description of Artificial Sequence: Syntheticoligonucleotide
  source 1..27: mol_type = other RNA
aaccaaatgatggaaaacaactggatc

SEQ ID NO: 2952 - RNA, 27 nt, synthetic construct
  misc_feature 1..27: note = Description of Artificial Sequence: Syntheticoligonucleotide
  source 1..27: mol_type = other RNA
gcaaccaaatgatggaaaacaactgga

SEQ ID NO: 2953 - RNA, 27 nt, synthetic construct
  misc_feature 1..27: note = Description of Artificial Sequence: Syntheticoligonucleotide
  source 1..27: mol_type = other RNA
ttttaatgtttgatatgaccaacattc

SEQ ID NO: 2954 - RNA, 27 nt, synthetic construct
  misc_feature 1..27: note = Description of Artificial Sequence: Syntheticoligonucleotide
  source 1..27: mol_type = other RNA
tttttaatgtttgatatgaccaacatt

SEQ ID NO: 2955 - RNA, 27 nt, synthetic construct
  misc_feature 1..27: note = Description of Artificial Sequence: Syntheticoligonucleotide
  source 1..27: mol_type = other RNA
atttttaatgtttgatatgaccaacat

SEQ ID NO: 2956 - RNA, 27 nt, synthetic construct
  misc_feature 1..27: note = Description of Artificial Sequence: Syntheticoligonucleotide
  source 1..27: mol_type = other RNA
ggtcatttttaatgtttgatatgacca

SEQ ID NO: 2957 - RNA, 27 nt, synthetic construct
  misc_feature 1..27: note = Description of Artificial Sequence: Syntheticoligonucleotide
  source 1..27: mol_type = other RNA
tttcaattaaaagagtggtcattttta

SEQ ID NO: 2958 - RNA, 27 nt, synthetic construct
  misc_feature 1..27: note = Description of Artificial Sequence: Syntheticoligonucleotide
  source 1..27: mol_type = other RNA
atttcaattaaaagagtggtcattttt

SEQ ID NO: 2959 - RNA, 27 nt, synthetic construct
  misc_feature 1..27: note = Description of Artificial Sequence: Syntheticoligonucleotide
  source 1..27: mol_type = other RNA
taaaagttaatttcaattaaaagagtg

SEQ ID NO: 2960 - RNA, 27 nt, synthetic construct
  misc_feature 1..27: note = Description of Artificial Sequence: Syntheticoligonucleotide
  source 1..27: mol_type = other RNA
ttaaaagttaatttcaattaaaagagt

SEQ ID NO: 2961 - RNA, 27 nt, synthetic construct
  misc_feature 1..27: note = Description of Artificial Sequence: Syntheticoligonucleotide
  source 1..27: mol_type = other RNA
atttaaaagttaatttcaattaaaaga

SEQ ID NO: 2962 - RNA, 27 nt, synthetic construct
  misc_feature 1..27: note = Description of Artificial Sequence: Syntheticoligonucleotide
  source 1..27: mol_type = other RNA
acatttaaaagttaatttcaattaaaa

SEQ ID NO: 2963 - RNA, 27 nt, synthetic construct
  misc_feature 1..27: note = Description of Artificial Sequence: Syntheticoligonucleotide
  source 1..27: mol_type = other RNA
aacatttaaaagttaatttcaattaaa

SEQ ID NO: 2964 - RNA, 27 nt, synthetic construct
  misc_feature 1..27: note = Description of Artificial Sequence: Syntheticoligonucleotide
  source 1..27: mol_type = other RNA
aaacatttaaaagttaatttcaattaa

SEQ ID NO: 2965 - RNA, 27 nt, synthetic construct
  misc_feature 1..27: note = Description of Artificial Sequence: Syntheticoligonucleotide
  source 1..27: mol_type = other RNA
taaacatttaaaagttaatttcaatta

SEQ ID NO: 2966 - RNA, 27 nt, synthetic construct
  misc_feature 1..27: note = Description of Artificial Sequence: Syntheticoligonucleotide
  source 1..27: mol_type = other RNA
ataaacatttaaaagttaatttcaatt

SEQ ID NO: 2967 - RNA, 27 nt, synthetic construct
  misc_feature 1..27: note = Description of Artificial Sequence: Syntheticoligonucleotide
  source 1..27: mol_type = other RNA
tataaacatttaaaagttaatttcaat

SEQ ID NO: 2968 - RNA, 27 nt, synthetic construct
  misc_feature 1..27: note = Description of Artificial Sequence: Syntheticoligonucleotide
  source 1..27: mol_type = other RNA
tcctataaacatttaaaagttaatttc

SEQ ID NO: 2969 - RNA, 27 nt, synthetic construct
  misc_feature 1..27: note = Description of Artificial Sequence: Syntheticoligonucleotide
  source 1..27: mol_type = other RNA
atactcctataaacatttaaaagttaa

SEQ ID NO: 2970 - RNA, 27 nt, synthetic construct
  misc_feature 1..27: note = Description of Artificial Sequence: Syntheticoligonucleotide
  source 1..27: mol_type = other RNA
gcacatactcctataaacatttaaaag

SEQ ID NO: 2971 - RNA, 27 nt, synthetic construct
  misc_feature 1..27: note = Description of Artificial Sequence: Syntheticoligonucleotide
  source 1..27: mol_type = other RNA
agcacatactcctataaacatttaaaa

SEQ ID NO: 2972 - RNA, 27 nt, synthetic construct
  misc_feature 1..27: note = Description of Artificial Sequence: Syntheticoligonucleotide
  source 1..27: mol_type = other RNA
tacaaattttagatcacttcacagcac

SEQ ID NO: 2973 - RNA, 27 nt, synthetic construct
  misc_feature 1..27: note = Description of Artificial Sequence: Syntheticoligonucleotide
  source 1..27: mol_type = other RNA
attacaaattttagatcacttcacagc

SEQ ID NO: 2974 - RNA, 27 nt, synthetic construct
  misc_feature 1..27: note = Description of Artificial Sequence: Syntheticoligonucleotide
  source 1..27: mol_type = other RNA
tattacaaattttagatcacttcacag

SEQ ID NO: 2975 - RNA, 27 nt, synthetic construct
  misc_feature 1..27: note = Description of Artificial Sequence: Syntheticoligonucleotide
  source 1..27: mol_type = other RNA
atattacaaattttagatcacttcaca

SEQ ID NO: 2976 - RNA, 27 nt, synthetic construct
  misc_feature 1..27: note = Description of Artificial Sequence: Syntheticoligonucleotide
  source 1..27: mol_type = other RNA
aatattacaaattttagatcacttcac

SEQ ID NO: 2977 - RNA, 27 nt, synthetic construct
  misc_feature 1..27: note = Description of Artificial Sequence: Syntheticoligonucleotide
  source 1..27: mol_type = other RNA
aaatattacaaattttagatcacttca

SEQ ID NO: 2978 - RNA, 27 nt, synthetic construct
  misc_feature 1..27: note = Description of Artificial Sequence: Syntheticoligonucleotide
  source 1..27: mol_type = other RNA
aaaatattacaaattttagatcacttc

SEQ ID NO: 2979 - RNA, 27 nt, synthetic construct
  misc_feature 1..27: note = Description of Artificial Sequence: Syntheticoligonucleotide
  source 1..27: mol_type = other RNA
gacaaaaatattacaaattttagatca

SEQ ID NO: 2980 - RNA, 27 nt, synthetic construct
  misc_feature 1..27: note = Description of Artificial Sequence: Syntheticoligonucleotide
  source 1..27: mol_type = other RNA
tgacaaaaatattacaaattttagatc

SEQ ID NO: 2981 - RNA, 27 nt, synthetic construct
  misc_feature 1..27: note = Description of Artificial Sequence: Syntheticoligonucleotide
  source 1..27: mol_type = other RNA
ttcatgacaaaaatattacaaatttta

SEQ ID NO: 2982 - RNA, 27 nt, synthetic construct
  misc_feature 1..27: note = Description of Artificial Sequence: Syntheticoligonucleotide
  source 1..27: mol_type = other RNA
gttcatgacaaaaatattacaaatttt

SEQ ID NO: 2983 - RNA, 27 nt, synthetic construct
  misc_feature 1..27: note = Description of Artificial Sequence: Syntheticoligonucleotide
  source 1..27: mol_type = other RNA
agttcatgacaaaaatattacaaattt

SEQ ID NO: 2984 - RNA, 27 nt, synthetic construct
  misc_feature 1..27: note = Description of Artificial Sequence: Syntheticoligonucleotide
  source 1..27: mol_type = other RNA
gtacagttcatgacaaaaatattacaa

SEQ ID NO: 2985 - RNA, 27 nt, synthetic construct
  misc_feature 1..27: note = Description of Artificial Sequence: Syntheticoligonucleotide
  source 1..27: mol_type = other RNA
agtacagttcatgacaaaaatattaca

SEQ ID NO: 2986 - RNA, 27 nt, synthetic construct
  misc_feature 1..27: note = Description of Artificial Sequence: Syntheticoligonucleotide
  source 1..27: mol_type = other RNA
tacaataattaggagtagtacagttca

SEQ ID NO: 2987 - RNA, 27 nt, synthetic construct
  misc_feature 1..27: note = Description of Artificial Sequence: Syntheticoligonucleotide
  source 1..27: mol_type = other RNA
ttacaataattaggagtagtacagttc

SEQ ID NO: 2988 - RNA, 27 nt, synthetic construct
  misc_feature 1..27: note = Description of Artificial Sequence: Syntheticoligonucleotide
  source 1..27: mol_type = other RNA
ttttattacattacaataattaggagt

SEQ ID NO: 2989 - RNA, 27 nt, synthetic construct
  misc_feature 1..27: note = Description of Artificial Sequence: Syntheticoligonucleotide
  source 1..27: mol_type = other RNA
tttttattacattacaataattaggag

SEQ ID NO: 2990 - RNA, 27 nt, synthetic construct
  misc_feature 1..27: note = Description of Artificial Sequence: Syntheticoligonucleotide
  source 1..27: mol_type = other RNA
tatttttattacattacaataattagg

SEQ ID NO: 2991 - RNA, 27 nt, synthetic construct
  misc_feature 1..27: note = Description of Artificial Sequence: Syntheticoligonucleotide
  source 1..27: mol_type = other RNA
actatttttattacattacaataatta

SEQ ID NO: 2992 - RNA, 27 nt, synthetic construct
  misc_feature 1..27: note = Description of Artificial Sequence: Syntheticoligonucleotide
  source 1..27: mol_type = other RNA
aactatttttattacattacaataatt

SEQ ID NO: 2993 - RNA, 27 nt, synthetic construct
  misc_feature 1..27: note = Description of Artificial Sequence: Syntheticoligonucleotide
  source 1..27: mol_type = other RNA
gtaactatttttattacattacaataa

SEQ ID NO: 2994 - RNA, 27 nt, synthetic construct
  misc_feature 1..27: note = Description of Artificial Sequence: Syntheticoligonucleotide
  source 1..27: mol_type = other RNA
tgtaactatttttattacattacaata

SEQ ID NO: 2995 - RNA, 27 nt, synthetic construct
  misc_feature 1..27: note = Description of Artificial Sequence: Syntheticoligonucleotide
  source 1..27: mol_type = other RNA
tcactgtaactatttttattacattac

SEQ ID NO: 2996 - RNA, 27 nt, synthetic construct
  misc_feature 1..27: note = Description of Artificial Sequence: Syntheticoligonucleotide
  source 1..27: mol_type = other RNA
gtcactgtaactatttttattacatta

SEQ ID NO: 2997 - RNA, 27 nt, synthetic construct
  misc_feature 1..27: note = Description of Artificial Sequence: Syntheticoligonucleotide
  source 1..27: mol_type = other RNA
tgtcactgtaactatttttattacatt

SEQ ID NO: 2998 - RNA, 27 nt, synthetic construct
  misc_feature 1..27: note = Description of Artificial Sequence: Syntheticoligonucleotide
  source 1..27: mol_type = other RNA
tttttttttgtcactgtaactattttt

SEQ ID NO: 2999 - RNA, 27 nt, synthetic construct
  misc_feature 1..27: note = Description of Artificial Sequence: Syntheticoligonucleotide
  source 1..27: mol_type = other RNA
ttttttttttgtcactgtaactatttt

SEQ ID NO: 3000 - RNA, 27 nt, synthetic construct
  misc_feature 1..27: note = Description of Artificial Sequence: Syntheticoligonucleotide
  source 1..27: mol_type = other RNA
ttttttttttttgtcactgtaactatt

SEQ ID NO: 3001 - DNA, 25 bp, synthetic construct
  misc_feature 1..25: note = Description of Artificial Sequence: Syntheticoligonucleotide
  misc_feature 1..25: note = Description of Combined DNA/RNA Molecule: Syntheticoligonucleotide
  source 1..25: mol_type = other DNA
  modified_base order(1,4,10,14,18,20): mod_base = OTHER; note = Uracil
tgctgaaaatgactgaatataaact

SEQ ID NO: 3002 - DNA, 25 bp, synthetic construct
  misc_feature 1..25: note = Description of Artificial Sequence: Syntheticoligonucleotide
  misc_feature 1..25: note = Description of Combined DNA/RNA Molecule: Syntheticoligonucleotide
  source 1..25: mol_type = other DNA
  modified_base order(4,8,12,14,19,20,22): mod_base = OTHER; note = Uracil
aaatgactgaatataaacttgtggt

SEQ ID NO: 3003 - DNA, 25 bp, synthetic construct
  misc_feature 1..25: note = Description of Artificial Sequence: Syntheticoligonucleotide
  misc_feature 1..25: note = Description of Combined DNA/RNA Molecule: Syntheticoligonucleotide
  source 1..25: mol_type = other DNA
  modified_base order(4,8,10,15,16,18,21): mod_base = OTHER; note = Uracil
gactgaatataaacttgtggtagtt

SEQ ID NO: 3004 - RNA, 25 nt, synthetic construct
  misc_feature 1..25: note = Description of Artificial Sequence: Syntheticoligonucleotide
  source 1..25: mol_type = other RNA
agctaattcagaatcattttgtgga

SEQ ID NO: 3005 - RNA, 25 nt, synthetic construct
  misc_feature 1..25: note = Description of Artificial Sequence: Syntheticoligonucleotide
  source 1..25: mol_type = other RNA
acgaatatgatccaacaatagagga

SEQ ID NO: 3006 - RNA, 25 nt, synthetic construct
  misc_feature 1..25: note = Description of Artificial Sequence: Syntheticoligonucleotide
  source 1..25: mol_type = other RNA
agcaagtagtaattgatggagaaac

SEQ ID NO: 3007 - RNA, 25 nt, synthetic construct
  misc_feature 1..25: note = Description of Artificial Sequence: Syntheticoligonucleotide
  source 1..25: mol_type = other RNA
ggagggctttctttgtgtatttgcc

SEQ ID NO: 3008 - DNA, 25 bp, synthetic construct
  misc_feature 1..25: note = Description of Artificial Sequence: Syntheticoligonucleotide
  misc_feature 1..25: note = Description of Combined DNA/RNA Molecule: Syntheticoligonucleotide
  source 1..25: mol_type = other DNA
  modified_base order(1,3,4,5,7,9,11,12,13,18,22): mod_base = OTHER; note = Uracil
tctttgtgtatttgccataaataat

SEQ ID NO: 3009 - DNA, 25 bp, synthetic construct
  misc_feature 1..25: note = Description of Artificial Sequence: Syntheticoligonucleotide
  misc_feature 1..25: note = Description of Combined DNA/RNA Molecule: Syntheticoligonucleotide
  source 1..25: mol_type = other DNA
  modified_base order(2,3,4,6,8,10,11,12,17,21): mod_base = OTHER; note = Uracil
ctttgtgtatttgccataaataata

SEQ ID NO: 3010 - RNA, 25 nt, synthetic construct
  misc_feature 1..25: note = Description of Artificial Sequence: Syntheticoligonucleotide
  source 1..25: mol_type = other RNA
tttgtgtatttgccataaataatac

SEQ ID NO: 3011 - DNA, 25 bp, synthetic construct
  misc_feature 1..25: note = Description of Artificial Sequence: Syntheticoligonucleotide
  misc_feature 1..25: note = Description of Combined DNA/RNA Molecule: Syntheticoligonucleotide
  source 1..25: mol_type = other DNA
  modified_base order(1,2,4,6,8,9,10,15,19,22): mod_base = OTHER; note = Uracil
ttgtgtatttgccataaataatact

SEQ ID NO: 3012 - DNA, 25 bp, synthetic construct
  misc_feature 1..25: note = Description of Artificial Sequence: Syntheticoligonucleotide
  misc_feature 1..25: note = Description of Combined DNA/RNA Molecule: Syntheticoligonucleotide
  source 1..25: mol_type = other DNA
  modified_base order(2,4,5,6,11,15,18,21): mod_base = OTHER; note = Uracil
gtatttgccataaataatactaaat

SEQ ID NO: 3013 - DNA, 25 bp, synthetic construct
  misc_feature 1..25: note = Description of Artificial Sequence: Syntheticoligonucleotide
  misc_feature 1..25: note = Description of Combined DNA/RNA Molecule: Syntheticoligonucleotide
  source 1..25: mol_type = other DNA
  modified_base order(1,3,4,5,10,14,17,20): mod_base = OTHER; note = Uracil
tatttgccataaataatactaaatc

SEQ ID NO: 3014 - RNA, 25 nt, synthetic construct
  misc_feature 1..25: note = Description of Artificial Sequence: Syntheticoligonucleotide
  source 1..25: mol_type = other RNA
ccataaataatactaaatcatttga

SEQ ID NO: 3015 - RNA, 25 nt, synthetic construct
  misc_feature 1..25: note = Description of Artificial Sequence: Syntheticoligonucleotide
  source 1..25: mol_type = other RNA
cataaataatactaaatcatttgaa

SEQ ID NO: 3016 - RNA, 25 nt, synthetic construct
  misc_feature 1..25: note = Description of Artificial Sequence: Syntheticoligonucleotide
  source 1..25: mol_type = other RNA
taaataatactaaatcatttgaaga

SEQ ID NO: 3017 - DNA, 25 bp, synthetic construct
  misc_feature 1..25: note = Description of Artificial Sequence: Syntheticoligonucleotide
  misc_feature 1..25: note = Description of Combined DNA/RNA Molecule: Syntheticoligonucleotide
  source 1..25: mol_type = other DNA
  modified_base order(4,7,10,14,17,18,19): mod_base = OTHER; note = Uracil
aaataatactaaatcatttgaagat

SEQ ID NO: 3018 - DNA, 25 bp, synthetic construct
  misc_feature 1..25: note = Description of Artificial Sequence: Syntheticoligonucleotide
  misc_feature 1..25: note = Description of Combined DNA/RNA Molecule: Syntheticoligonucleotide
  source 1..25: mol_type = other DNA
  modified_base order(3,6,9,13,16,17,18): mod_base = OTHER; note = Uracil
aataatactaaatcatttgaagata

SEQ ID NO: 3019 - DNA, 25 bp, synthetic construct
  misc_feature 1..25: note = Description of Artificial Sequence: Syntheticoligonucleotide
  misc_feature 1..25: note = Description of Combined DNA/RNA Molecule: Syntheticoligonucleotide
  source 1..25: mol_type = other DNA
  modified_base order(2,5,8,12,15,16,17,23): mod_base = OTHER; note = Uracil
ataatactaaatcatttgaagatat

SEQ ID NO: 3020 - RNA, 25 nt, synthetic construct
  misc_feature 1..25: note = Description of Artificial Sequence: Syntheticoligonucleotide
  source 1..25: mol_type = other RNA
atttgaagatattcaccattataga

SEQ ID NO: 3021 - RNA, 25 nt, synthetic construct
  misc_feature 1..25: note = Description of Artificial Sequence: Syntheticoligonucleotide
  source 1..25: mol_type = other RNA
ttgaagatattcaccattatagaga

SEQ ID NO: 3022 - RNA, 25 nt, synthetic construct
  misc_feature 1..25: note = Description of Artificial Sequence: Syntheticoligonucleotide
  source 1..25: mol_type = other RNA
tgaagatattcaccattatagagaa

SEQ ID NO: 3023 - RNA, 25 nt, synthetic construct
  misc_feature 1..25: note = Description of Artificial Sequence: Syntheticoligonucleotide
  source 1..25: mol_type = other RNA
gaagatattcaccattatagagaac

SEQ ID NO: 3024 - RNA, 25 nt, synthetic construct
  misc_feature 1..25: note = Description of Artificial Sequence: Syntheticoligonucleotide
  source 1..25: mol_type = other RNA
aagatattcaccattatagagaaca

SEQ ID NO: 3025 - RNA, 25 nt, synthetic construct
  misc_feature 1..25: note = Description of Artificial Sequence: Syntheticoligonucleotide
  source 1..25: mol_type = other RNA
ccattatagagaacaaattaaaaga

SEQ ID NO: 3026 - DNA, 25 bp, synthetic construct
  misc_feature 1..25: note = Description of Artificial Sequence: Syntheticoligonucleotide
  misc_feature 1..25: note = Description of Combined DNA/RNA Molecule: Syntheticoligonucleotide
  source 1..25: mol_type = other DNA
  modified_base order(2,3,5,16,17): mod_base = OTHER; note = Uracil
attatagagaacaaattaaaagagt

SEQ ID NO: 3027 - DNA, 25 bp, synthetic construct
  misc_feature 1..25: note = Description of Artificial Sequence: Syntheticoligonucleotide
  misc_feature 1..25: note = Description of Combined DNA/RNA Molecule: Syntheticoligonucleotide
  source 1..25: mol_type = other DNA
  modified_base order(1,2,4,15,16): mod_base = OTHER; note = Uracil
ttatagagaacaaattaaaagagtt

SEQ ID NO: 3028 - DNA, 25 bp, synthetic construct
  misc_feature 1..25: note = Description of Artificial Sequence: Syntheticoligonucleotide
  misc_feature 1..25: note = Description of Combined DNA/RNA Molecule: Syntheticoligonucleotide
  source 1..25: mol_type = other DNA
  modified_base order(1,3,14,15,23): mod_base = OTHER; note = Uracil
tatagagaacaaattaaaagagtta

SEQ ID NO: 3029 - RNA, 25 nt, synthetic construct
  misc_feature 1..25: note = Description of Artificial Sequence: Syntheticoligonucleotide
  source 1..25: mol_type = other RNA
atagagaacaaattaaaagagttaa

SEQ ID NO: 3030 - RNA, 25 nt, synthetic construct
  misc_feature 1..25: note = Description of Artificial Sequence: Syntheticoligonucleotide
  source 1..25: mol_type = other RNA
ctagtaggaaataaatgtgatttgc

SEQ ID NO: 3031 - RNA, 25 nt, synthetic construct
  misc_feature 1..25: note = Description of Artificial Sequence: Syntheticoligonucleotide
  source 1..25: mol_type = other RNA
tagtaggaaataaatgtgatttgcc

SEQ ID NO: 3032 - DNA, 25 bp, synthetic construct
  misc_feature 1..25: note = Description of Artificial Sequence: Syntheticoligonucleotide
  misc_feature 1..25: note = Description of Combined DNA/RNA Molecule: Syntheticoligonucleotide
  source 1..25: mol_type = other DNA
  modified_base order(7,8,10,15,16,19,20,21,22): mod_base = OTHER; note = Uracil
aagaagttatggaattccttttatt

SEQ ID NO: 3033 - RNA, 25 nt, synthetic construct
  misc_feature 1..25: note = Description of Artificial Sequence: Syntheticoligonucleotide
  source 1..25: mol_type = other RNA
aagttatggaattccttttattgaa

SEQ ID NO: 3034 - RNA, 25 nt, synthetic construct
  misc_feature 1..25: note = Description of Artificial Sequence: Syntheticoligonucleotide
  source 1..25: mol_type = other RNA
agttatggaattccttttattgaaa

SEQ ID NO: 3035 - RNA, 25 nt, synthetic construct
  misc_feature 1..25: note = Description of Artificial Sequence: Syntheticoligonucleotide
  source 1..25: mol_type = other RNA
gttatggaattccttttattgaaac

SEQ ID NO: 3036 - RNA, 25 nt, synthetic construct
  misc_feature 1..25: note = Description of Artificial Sequence: Syntheticoligonucleotide
  source 1..25: mol_type = other RNA
ttatggaattccttttattgaaaca

SEQ ID NO: 3037 - DNA, 25 bp, synthetic construct
  misc_feature 1..25: note = Description of Artificial Sequence: Syntheticoligonucleotide
  misc_feature 1..25: note = Description of Combined DNA/RNA Molecule: Syntheticoligonucleotide
  source 1..25: mol_type = other DNA
  modified_base order(1,8,11,12,13,14,15,17,21,22): mod_base = OTHER; note = Uracil
tggaggatgctttttatacattggt

SEQ ID NO: 3038 - RNA, 25 nt, synthetic construct
  misc_feature 1..25: note = Description of Artificial Sequence: Syntheticoligonucleotide
  source 1..25: mol_type = other RNA
gaggatgctttttatacattggtga

SEQ ID NO: 3039 - RNA, 25 nt, synthetic construct
  misc_feature 1..25: note = Description of Artificial Sequence: Syntheticoligonucleotide
  source 1..25: mol_type = other RNA
acagattgaaaaaaatcagcaaaga

SEQ ID NO: 3040 - RNA, 25 nt, synthetic construct
  misc_feature 1..25: note = Description of Artificial Sequence: Syntheticoligonucleotide
  source 1..25: mol_type = other RNA
cagattgaaaaaaatcagcaaagaa

SEQ ID NO: 3041 - RNA, 25 nt, synthetic construct
  misc_feature 1..25: note = Description of Artificial Sequence: Syntheticoligonucleotide
  source 1..25: mol_type = other RNA
gattgaaaaaaatcagcaaagaaga

SEQ ID NO: 3042 - RNA, 25 nt, synthetic construct
  misc_feature 1..25: note = Description of Artificial Sequence: Syntheticoligonucleotide
  source 1..25: mol_type = other RNA
attgaaaaaaatcagcaaagaagaa

SEQ ID NO: 3043 - RNA, 25 nt, synthetic construct
  misc_feature 1..25: note = Description of Artificial Sequence: Syntheticoligonucleotide
  source 1..25: mol_type = other RNA
ttgaaaaaaatcagcaaagaagaaa

SEQ ID NO: 3044 - RNA, 25 nt, synthetic construct
  misc_feature 1..25: note = Description of Artificial Sequence: Syntheticoligonucleotide
  source 1..25: mol_type = other RNA
tgaaaaaaatcagcaaagaagaaaa

SEQ ID NO: 3045 - RNA, 25 nt, synthetic construct
  misc_feature 1..25: note = Description of Artificial Sequence: Syntheticoligonucleotide
  source 1..25: mol_type = other RNA
tcctggctgtgtgaaaattaaaaaa

SEQ ID NO: 3046 - RNA, 25 nt, synthetic construct
  misc_feature 1..25: note = Description of Artificial Sequence: Syntheticoligonucleotide
  source 1..25: mol_type = other RNA
ggctgtgtgaaaattaaaaaatgca

SEQ ID NO: 3047 - DNA, 25 bp, synthetic construct
  misc_feature 1..25: note = Description of Artificial Sequence: Syntheticoligonucleotide
  misc_feature 1..25: note = Description of Combined DNA/RNA Molecule: Syntheticoligonucleotide
  source 1..25: mol_type = other DNA
  modified_base order(2,4,10,11,18,22,23): mod_base = OTHER; note = Uracil
gtgtgaaaattaaaaaatgcattat

SEQ ID NO: 3048 - DNA, 25 bp, synthetic construct
  misc_feature 1..25: note = Description of Artificial Sequence: Syntheticoligonucleotide
  misc_feature 1..25: note = Description of Combined DNA/RNA Molecule: Syntheticoligonucleotide
  source 1..25: mol_type = other DNA
  modified_base order(1,3,9,10,17,21,22): mod_base = OTHER; note = Uracil
tgtgaaaattaaaaaatgcattata

SEQ ID NO: 3049 - RNA, 25 nt, synthetic construct
  misc_feature 1..25: note = Description of Artificial Sequence: Syntheticoligonucleotide
  source 1..25: mol_type = other RNA
gtgaaaattaaaaaatgcattataa

SEQ ID NO: 3050 - DNA, 25 bp, synthetic construct
  misc_feature 1..25: note = Description of Artificial Sequence: Syntheticoligonucleotide
  misc_feature 1..25: note = Description of Combined DNA/RNA Molecule: Syntheticoligonucleotide
  source 1..25: mol_type = other DNA
  modified_base order(1,7,8,15,19,20,22): mod_base = OTHER; note = Uracil
tgaaaattaaaaaatgcattataat

SEQ ID NO: 3051 - DNA, 25 bp, synthetic construct
  misc_feature 1..25: note = Description of Artificial Sequence: Syntheticoligonucleotide
  misc_feature 1..25: note = Description of Combined DNA/RNA Molecule: Syntheticoligonucleotide
  source 1..25: mol_type = other DNA
  modified_base order(5,6,13,17,18,20,23): mod_base = OTHER; note = Uracil
aaaattaaaaaatgcattataatgt

SEQ ID NO: 3052 - DNA, 25 bp, synthetic construct
  misc_feature 1..25: note = Description of Artificial Sequence: Syntheticoligonucleotide
  misc_feature 1..25: note = Description of Combined DNA/RNA Molecule: Syntheticoligonucleotide
  source 1..25: mol_type = other DNA
  modified_base order(4,5,12,16,17,19,22): mod_base = OTHER; note = Uracil
aaattaaaaaatgcattataatgta

SEQ ID NO: 3053 - RNA, 25 nt, synthetic construct
  misc_feature 1..25: note = Description of Artificial Sequence: Syntheticoligonucleotide
  source 1..25: mol_type = other RNA
aattaaaaaatgcattataatgtaa

SEQ ID NO: 3054 - DNA, 25 bp, synthetic construct
  misc_feature 1..25: note = Description of Artificial Sequence: Syntheticoligonucleotide
  misc_feature 1..25: note = Description of Combined DNA/RNA Molecule: Syntheticoligonucleotide
  source 1..25: mol_type = other DNA
  modified_base order(2,3,10,14,15,17,20,22): mod_base = OTHER; note = Uracil
attaaaaaatgcattataatgtaat

SEQ ID NO: 3055 - DNA, 25 bp, synthetic construct
  misc_feature 1..25: note = Description of Artificial Sequence: Syntheticoligonucleotide
  misc_feature 1..25: note = Description of Combined DNA/RNA Molecule: Syntheticoligonucleotide
  source 1..25: mol_type = other DNA
  modified_base order(1,8,12,13,15,18,20,23): mod_base = OTHER; note = Uracil
taaaaaatgcattataatgtaatct

SEQ ID NO: 3056 - DNA, 25 bp, synthetic construct
  misc_feature 1..25: note = Description of Artificial Sequence: Syntheticoligonucleotide
  misc_feature 1..25: note = Description of Combined DNA/RNA Molecule: Syntheticoligonucleotide
  source 1..25: mol_type = other DNA
  modified_base order(1,5,6,8,11,13,16,18,22): mod_base = OTHER; note = Uracil
tgcattataatgtaatctgggtgtt

SEQ ID NO: 3057 - RNA, 25 nt, synthetic construct
  misc_feature 1..25: note = Description of Artificial Sequence: Syntheticoligonucleotide
  source 1..25: mol_type = other RNA
ttcgagaaattcgaaaacataaaga

SEQ ID NO: 3058 - RNA, 25 nt, synthetic construct
  misc_feature 1..25: note = Description of Artificial Sequence: Syntheticoligonucleotide
  source 1..25: mol_type = other RNA
tcgagaaattcgaaaacataaagaa

SEQ ID NO: 3059 - RNA, 25 nt, synthetic construct
  misc_feature 1..25: note = Description of Artificial Sequence: Syntheticoligonucleotide
  source 1..25: mol_type = other RNA
cgagaaattcgaaaacataaagaaa

SEQ ID NO: 3060 - RNA, 25 nt, synthetic construct
  misc_feature 1..25: note = Description of Artificial Sequence: Syntheticoligonucleotide
  source 1..25: mol_type = other RNA
gaaattcgaaaacataaagaaaaga

SEQ ID NO: 3061 - RNA, 25 nt, synthetic construct
  misc_feature 1..25: note = Description of Artificial Sequence: Syntheticoligonucleotide
  source 1..25: mol_type = other RNA
tcgaaaacataaagaaaagatgagc

SEQ ID NO: 3062 - RNA, 25 nt, synthetic construct
  misc_feature 1..25: note = Description of Artificial Sequence: Syntheticoligonucleotide
  source 1..25: mol_type = other RNA
cgaaaacataaagaaaagatgagca

SEQ ID NO: 3063 - RNA, 25 nt, synthetic construct
  misc_feature 1..25: note = Description of Artificial Sequence: Syntheticoligonucleotide
  source 1..25: mol_type = other RNA
aaagatggtaaaaagaagaaaaaga

SEQ ID NO: 3064 - RNA, 25 nt, synthetic construct
  misc_feature 1..25: note = Description of Artificial Sequence: Syntheticoligonucleotide
  source 1..25: mol_type = other RNA
aagatggtaaaaagaagaaaaagaa

SEQ ID NO: 3065 - DNA, 25 bp, synthetic construct
  misc_feature 1..25: note = Description of Artificial Sequence: Syntheticoligonucleotide
  misc_feature 1..25: note = Description of Combined DNA/RNA Molecule: Syntheticoligonucleotide
  source 1..25: mol_type = other DNA
  modified_base order(3,6): mod_base = OTHER; note = Uracil
gatggtaaaaagaagaaaaagaagt

SEQ ID NO: 3066 - DNA, 25 bp, synthetic construct
  misc_feature 1..25: note = Description of Artificial Sequence: Syntheticoligonucleotide
  misc_feature 1..25: note = Description of Combined DNA/RNA Molecule: Syntheticoligonucleotide
  source 1..25: mol_type = other DNA
  modified_base order(2,5): mod_base = OTHER; note = Uracil
atggtaaaaagaagaaaaagaagtc

SEQ ID NO: 3067 - RNA, 25 nt, synthetic construct
  misc_feature 1..25: note = Description of Artificial Sequence: Syntheticoligonucleotide
  source 1..25: mol_type = other RNA
aaaaagaagaaaaagaagtcaaaga

SEQ ID NO: 3068 - RNA, 25 nt, synthetic construct
  misc_feature 1..25: note = Description of Artificial Sequence: Syntheticoligonucleotide
  source 1..25: mol_type = other RNA
aaaagaagaaaaagaagtcaaagac

SEQ ID NO: 3069 - RNA, 25 nt, synthetic construct
  misc_feature 1..25: note = Description of Artificial Sequence: Syntheticoligonucleotide
  source 1..25: mol_type = other RNA
aaagaagaaaaagaagtcaaagaca

SEQ ID NO: 3070 - DNA, 25 bp, synthetic construct
  misc_feature 1..25: note = Description of Artificial Sequence: Syntheticoligonucleotide
  misc_feature 1..25: note = Description of Combined DNA/RNA Molecule: Syntheticoligonucleotide
  source 1..25: mol_type = other DNA
  modified_base order(1,13,15,17,20,21,23): mod_base = OTHER; note = Uracil
tcaaagacaaagtgtgtaattatgt

SEQ ID NO: 3071 - DNA, 25 bp, synthetic construct
  misc_feature 1..25: note = Description of Artificial Sequence: Syntheticoligonucleotide
  misc_feature 1..25: note = Description of Combined DNA/RNA Molecule: Syntheticoligonucleotide
  source 1..25: mol_type = other DNA
  modified_base order(12,14,16,19,20,22): mod_base = OTHER; note = Uracil
caaagacaaagtgtgtaattatgta

SEQ ID NO: 3072 - DNA, 25 bp, synthetic construct
  misc_feature 1..25: note = Description of Artificial Sequence: Syntheticoligonucleotide
  misc_feature 1..25: note = Description of Combined DNA/RNA Molecule: Syntheticoligonucleotide
  source 1..25: mol_type = other DNA
  modified_base order(8,10,12,15,16,18,20): mod_base = OTHER; note = Uracil
gacaaagtgtgtaattatgtaaata

SEQ ID NO: 3073 - RNA, 25 nt, synthetic construct
  misc_feature 1..25: note = Description of Artificial Sequence: Syntheticoligonucleotide
  source 1..25: mol_type = other RNA
caaagtgtgtaattatgtaaataca

SEQ ID NO: 3074 - DNA, 25 bp, synthetic construct
  misc_feature 1..25: note = Description of Artificial Sequence: Syntheticoligonucleotide
  misc_feature 1..25: note = Description of Combined DNA/RNA Molecule: Syntheticoligonucleotide
  source 1..25: mol_type = other DNA
  modified_base order(2,4,6,9,10,12,14,18,23): mod_base = OTHER; note = Uracil
gtgtgtaattatgtaaatacaattt

SEQ ID NO: 3075 - DNA, 25 bp, synthetic construct
  misc_feature 1..25: note = Description of Artificial Sequence: Syntheticoligonucleotide
  misc_feature 1..25: note = Description of Combined DNA/RNA Molecule: Syntheticoligonucleotide
  source 1..25: mol_type = other DNA
  modified_base order(2,4,7,8,10,12,16,21,22,23): mod_base = OTHER; note = Uracil
gtgtaattatgtaaatacaatttgt

SEQ ID NO: 3076 - RNA, 25 nt, synthetic construct
  misc_feature 1..25: note = Description of Artificial Sequence: Syntheticoligonucleotide
  source 1..25: mol_type = other RNA
gtaattatgtaaatacaatttgtac

SEQ ID NO: 3077 - DNA, 25 bp, synthetic construct
  misc_feature 1..25: note = Description of Artificial Sequence: Syntheticoligonucleotide
  misc_feature 1..25: note = Description of Combined DNA/RNA Molecule: Syntheticoligonucleotide
  source 1..25: mol_type = other DNA
  modified_base order(1,4,5,7,9,13,18,19,20,22): mod_base = OTHER; note = Uracil
taattatgtaaatacaatttgtact

SEQ ID NO: 3078 - DNA, 25 bp, synthetic construct
  misc_feature 1..25: note = Description of Artificial Sequence: Syntheticoligonucleotide
  misc_feature 1..25: note = Description of Combined DNA/RNA Molecule: Syntheticoligonucleotide
  source 1..25: mol_type = other DNA
  modified_base order(1,3,5,9,14,15,16,18,21,22,23): mod_base = OTHER; note = Uracil
tatgtaaatacaatttgtacttttt

SEQ ID NO: 3079 - DNA, 25 bp, synthetic construct
  misc_feature 1..25: note = Description of Artificial Sequence: Syntheticoligonucleotide
  misc_feature 1..25: note = Description of Combined DNA/RNA Molecule: Syntheticoligonucleotide
  source 1..25: mol_type = other DNA
  modified_base order(2,4,8,13,14,15,17,20,21,22,23): mod_base = OTHER; note = Uracil
atgtaaatacaatttgtactttttt

SEQ ID NO: 3080 - DNA, 25 bp, synthetic construct
  misc_feature 1..25: note = Description of Artificial Sequence: Syntheticoligonucleotide
  misc_feature 1..25: note = Description of Combined DNA/RNA Molecule: Syntheticoligonucleotide
  source 1..25: mol_type = other DNA
  modified_base order(1,3,7,12,13,14,16,19,20,21,22,23): mod_base = OTHER; note = Uracil
tgtaaatacaatttgtacttttttc

SEQ ID NO: 3081 - DNA, 25 bp, synthetic construct
  misc_feature 1..25: note = Description of Artificial Sequence: Syntheticoligonucleotide
  misc_feature 1..25: note = Description of Combined DNA/RNA Molecule: Syntheticoligonucleotide
  source 1..25: mol_type = other DNA
  modified_base order(2,6,11,12,13,15,18,19,20,21,22,23): mod_base = OTHER; note = Uracil
gtaaatacaatttgtacttttttct

SEQ ID NO: 3082 - RNA, 25 nt, synthetic construct
  misc_feature 1..25: note = Description of Artificial Sequence: Syntheticoligonucleotide
  source 1..25: mol_type = other RNA
acaatttgtacttttttcttaaggc

SEQ ID NO: 3083 - RNA, 25 nt, synthetic construct
  misc_feature 1..25: note = Description of Artificial Sequence: Syntheticoligonucleotide
  source 1..25: mol_type = other RNA
caatttgtacttttttcttaaggca

SEQ ID NO: 3084 - DNA, 25 bp, synthetic construct
  misc_feature 1..25: note = Description of Artificial Sequence: Syntheticoligonucleotide
  misc_feature 1..25: note = Description of Combined DNA/RNA Molecule: Syntheticoligonucleotide
  source 1..25: mol_type = other DNA
  modified_base order(1,4,7,13,16,19,20,21,22,23): mod_base = OTHER; note = Uracil
tactagtacaagtggtaatttttgt

SEQ ID NO: 3085 - DNA, 25 bp, synthetic construct
  misc_feature 1..25: note = Description of Artificial Sequence: Syntheticoligonucleotide
  misc_feature 1..25: note = Description of Combined DNA/RNA Molecule: Syntheticoligonucleotide
  source 1..25: mol_type = other DNA
  modified_base order(3,6,12,15,18,19,20,21,22): mod_base = OTHER; note = Uracil
actagtacaagtggtaatttttgta

SEQ ID NO: 3086 - RNA, 25 nt, synthetic construct
  misc_feature 1..25: note = Description of Artificial Sequence: Syntheticoligonucleotide
  source 1..25: mol_type = other RNA
acaagtggtaatttttgtacattac

SEQ ID NO: 3087 - RNA, 25 nt, synthetic construct
  misc_feature 1..25: note = Description of Artificial Sequence: Syntheticoligonucleotide
  source 1..25: mol_type = other RNA
caagtggtaatttttgtacattaca

SEQ ID NO: 3088 - DNA, 25 bp, synthetic construct
  misc_feature 1..25: note = Description of Artificial Sequence: Syntheticoligonucleotide
  misc_feature 1..25: note = Description of Combined DNA/RNA Molecule: Syntheticoligonucleotide
  source 1..25: mol_type = other DNA
  modified_base order(1,4,5,6,7,8,10,14,15,20): mod_base = OTHER; note = Uracil
taatttttgtacattacactaaatt

SEQ ID NO: 3089 - DNA, 25 bp, synthetic construct
  misc_feature 1..25: note = Description of Artificial Sequence: Syntheticoligonucleotide
  misc_feature 1..25: note = Description of Combined DNA/RNA Molecule: Syntheticoligonucleotide
  source 1..25: mol_type = other DNA
  modified_base order(3,4,5,6,7,9,13,14,19,23): mod_base = OTHER; note = Uracil
aatttttgtacattacactaaatta

SEQ ID NO: 3090 - DNA, 25 bp, synthetic construct
  misc_feature 1..25: note = Description of Artificial Sequence: Syntheticoligonucleotide
  misc_feature 1..25: note = Description of Combined DNA/RNA Molecule: Syntheticoligonucleotide
  source 1..25: mol_type = other DNA
  modified_base order(2,3,4,5,6,8,12,13,18,22,23): mod_base = OTHER; note = Uracil
atttttgtacattacactaaattat

SEQ ID NO: 3091 - DNA, 25 bp, synthetic construct
  misc_feature 1..25: note = Description of Artificial Sequence: Syntheticoligonucleotide
  misc_feature 1..25: note = Description of Combined DNA/RNA Molecule: Syntheticoligonucleotide
  source 1..25: mol_type = other DNA
  modified_base order(1,2,3,4,5,7,11,12,17,21,22): mod_base = OTHER; note = Uracil
tttttgtacattacactaaattatt

SEQ ID NO: 3092 - DNA, 25 bp, synthetic construct
  misc_feature 1..25: note = Description of Artificial Sequence: Syntheticoligonucleotide
  misc_feature 1..25: note = Description of Combined DNA/RNA Molecule: Syntheticoligonucleotide
  source 1..25: mol_type = other DNA
  modified_base order(1,2,3,4,6,10,11,16,20,21,23): mod_base = OTHER; note = Uracil
ttttgtacattacactaaattatta

SEQ ID NO: 3093 - DNA, 25 bp, synthetic construct
  misc_feature 1..25: note = Description of Artificial Sequence: Syntheticoligonucleotide
  misc_feature 1..25: note = Description of Combined DNA/RNA Molecule: Syntheticoligonucleotide
  source 1..25: mol_type = other DNA
  modified_base order(4,8,9,11,12,17,18,19,21,22,23): mod_base = OTHER; note = Uracil
cactaaattattagcatttgtttta

SEQ ID NO: 3094 - RNA, 25 nt, synthetic construct
  misc_feature 1..25: note = Description of Artificial Sequence: Syntheticoligonucleotide
  source 1..25: mol_type = other RNA
ctaaattattagcatttgttttagc

SEQ ID NO: 3095 - RNA, 25 nt, synthetic construct
  misc_feature 1..25: note = Description of Artificial Sequence: Syntheticoligonucleotide
  source 1..25: mol_type = other RNA
taaattattagcatttgttttagca

SEQ ID NO: 3096 - RNA, 25 nt, synthetic construct
  misc_feature 1..25: note = Description of Artificial Sequence: Syntheticoligonucleotide
  source 1..25: mol_type = other RNA
tattagcatttgttttagcattacc

SEQ ID NO: 3097 - DNA, 25 bp, synthetic construct
  misc_feature 1..25: note = Description of Artificial Sequence: Syntheticoligonucleotide
  misc_feature 1..25: note = Description of Combined DNA/RNA Molecule: Syntheticoligonucleotide
  source 1..25: mol_type = other DNA
  modified_base order(3,4,5,7,8,9,10,15,16,20,23): mod_base = OTHER; note = Uracil
catttgttttagcattacctaattt

SEQ ID NO: 3098 - DNA, 25 bp, synthetic construct
  misc_feature 1..25: note = Description of Artificial Sequence: Syntheticoligonucleotide
  misc_feature 1..25: note = Description of Combined DNA/RNA Molecule: Syntheticoligonucleotide
  source 1..25: mol_type = other DNA
  modified_base order(2,3,4,6,7,8,9,14,15,19,22,23): mod_base = OTHER; note = Uracil
atttgttttagcattacctaatttt

SEQ ID NO: 3099 - DNA, 25 bp, synthetic construct
  misc_feature 1..25: note = Description of Artificial Sequence: Syntheticoligonucleotide
  misc_feature 1..25: note = Description of Combined DNA/RNA Molecule: Syntheticoligonucleotide
  source 1..25: mol_type = other DNA
  modified_base order(1,2,4,5,6,7,12,13,17,20,21,22,23): mod_base = OTHER; note = Uracil
ttgttttagcattacctaatttttt

SEQ ID NO: 3100 - DNA, 25 bp, synthetic construct
  misc_feature 1..25: note = Description of Artificial Sequence: Syntheticoligonucleotide
  misc_feature 1..25: note = Description of Combined DNA/RNA Molecule: Syntheticoligonucleotide
  source 1..25: mol_type = other DNA
  modified_base order(1,3,4,5,6,11,12,16,19,20,21,22,23): mod_base = OTHER; note = Uracil
tgttttagcattacctaattttttt

SEQ ID NO: 3101 - DNA, 25 bp, synthetic construct
  misc_feature 1..25: note = Description of Artificial Sequence: Syntheticoligonucleotide
  misc_feature 1..25: note = Description of Combined DNA/RNA Molecule: Syntheticoligonucleotide
  source 1..25: mol_type = other DNA
  modified_base order(2,3,4,5,10,11,15,18,19,20,21,22,23): mod_base = OTHER; note = Uracil
gttttagcattacctaatttttttc

SEQ ID NO: 3102 - RNA, 25 nt, synthetic construct
  misc_feature 1..25: note = Description of Artificial Sequence: Syntheticoligonucleotide
  source 1..25: mol_type = other RNA
ttttagcattacctaatttttttcc

SEQ ID NO: 3103 - RNA, 25 nt, synthetic construct
  misc_feature 1..25: note = Description of Artificial Sequence: Syntheticoligonucleotide
  source 1..25: mol_type = other RNA
gactgttagcttttaccttaaatgc

SEQ ID NO: 3104 - DNA, 25 bp, synthetic construct
  misc_feature 1..25: note = Description of Artificial Sequence: Syntheticoligonucleotide
  misc_feature 1..25: note = Description of Combined DNA/RNA Molecule: Syntheticoligonucleotide
  source 1..25: mol_type = other DNA
  modified_base order(3,5,6,10,11,12,13,17,18,22): mod_base = OTHER; note = Uracil
actgttagcttttaccttaaatgct

SEQ ID NO: 3105 - DNA, 25 bp, synthetic construct
  misc_feature 1..25: note = Description of Artificial Sequence: Syntheticoligonucleotide
  misc_feature 1..25: note = Description of Combined DNA/RNA Molecule: Syntheticoligonucleotide
  source 1..25: mol_type = other DNA
  modified_base order(4,5,6,7,11,12,16,19,20,22,23): mod_base = OTHER; note = Uracil
agcttttaccttaaatgcttatttt

SEQ ID NO: 3106 - DNA, 25 bp, synthetic construct
  misc_feature 1..25: note = Description of Artificial Sequence: Syntheticoligonucleotide
  misc_feature 1..25: note = Description of Combined DNA/RNA Molecule: Syntheticoligonucleotide
  source 1..25: mol_type = other DNA
  modified_base order(3,4,5,6,10,11,15,18,19,21,22,23): mod_base = OTHER; note = Uracil
gcttttaccttaaatgcttatttta

SEQ ID NO: 3107 - RNA, 25 nt, synthetic construct
  misc_feature 1..25: note = Description of Artificial Sequence: Syntheticoligonucleotide
  source 1..25: mol_type = other RNA
cttttaccttaaatgcttattttaa

SEQ ID NO: 3108 - RNA, 25 nt, synthetic construct
  misc_feature 1..25: note = Description of Artificial Sequence: Syntheticoligonucleotide
  source 1..25: mol_type = other RNA
ccttaaatgcttattttaaaatgac

SEQ ID NO: 3109 - RNA, 25 nt, synthetic construct
  misc_feature 1..25: note = Description of Artificial Sequence: Syntheticoligonucleotide
  source 1..25: mol_type = other RNA
cttaaatgcttattttaaaatgaca

SEQ ID NO: 3110 - RNA, 25 nt, synthetic construct
  misc_feature 1..25: note = Description of Artificial Sequence: Syntheticoligonucleotide
  source 1..25: mol_type = other RNA
tgcttattttaaaatgacagtggaa

SEQ ID NO: 3111 - DNA, 25 bp, synthetic construct
  misc_feature 1..25: note = Description of Artificial Sequence: Syntheticoligonucleotide
  misc_feature 1..25: note = Description of Combined DNA/RNA Molecule: Syntheticoligonucleotide
  source 1..25: mol_type = other DNA
  modified_base order(2,3,5,6,7,8,13,19): mod_base = OTHER; note = Uracil
cttattttaaaatgacagtggaagt

SEQ ID NO: 3112 - DNA, 25 bp, synthetic construct
  misc_feature 1..25: note = Description of Artificial Sequence: Syntheticoligonucleotide
  misc_feature 1..25: note = Description of Combined DNA/RNA Molecule: Syntheticoligonucleotide
  source 1..25: mol_type = other DNA
  modified_base order(2,8,9,10,11,12,13,14,15,16,19,21): mod_base = OTHER; note = Uracil
gtggaagtttttttttcctctaagt

SEQ ID NO: 3113 - RNA, 25 nt, synthetic construct
  misc_feature 1..25: note = Description of Artificial Sequence: Syntheticoligonucleotide
  source 1..25: mol_type = other RNA
ggaagtttttttttcctctaagtgc

SEQ ID NO: 3114 - RNA, 25 nt, synthetic construct
  misc_feature 1..25: note = Description of Artificial Sequence: Syntheticoligonucleotide
  source 1..25: mol_type = other RNA
gaagtttttttttcctctaagtgcc

SEQ ID NO: 3115 - RNA, 25 nt, synthetic construct
  misc_feature 1..25: note = Description of Artificial Sequence: Syntheticoligonucleotide
  source 1..25: mol_type = other RNA
ttttggtttttgaactagcaatgcc

SEQ ID NO: 3116 - RNA, 25 nt, synthetic construct
  misc_feature 1..25: note = Description of Artificial Sequence: Syntheticoligonucleotide
  source 1..25: mol_type = other RNA
gcctgtgaaaaagaaactgaatacc

SEQ ID NO: 3117 - DNA, 25 bp, synthetic construct
  misc_feature 1..25: note = Description of Artificial Sequence: Syntheticoligonucleotide
  misc_feature 1..25: note = Description of Combined DNA/RNA Molecule: Syntheticoligonucleotide
  source 1..25: mol_type = other DNA
  modified_base order(11,15,19): mod_base = OTHER; note = Uracil
aaaaagaaactgaatacctaagatt

SEQ ID NO: 3118 - DNA, 25 bp, synthetic construct
  misc_feature 1..25: note = Description of Artificial Sequence: Syntheticoligonucleotide
  misc_feature 1..25: note = Description of Combined DNA/RNA Molecule: Syntheticoligonucleotide
  source 1..25: mol_type = other DNA
  modified_base order(10,14,18,23): mod_base = OTHER; note = Uracil
aaaagaaactgaatacctaagattt

SEQ ID NO: 3119 - DNA, 25 bp, synthetic construct
  misc_feature 1..25: note = Description of Artificial Sequence: Syntheticoligonucleotide
  misc_feature 1..25: note = Description of Combined DNA/RNA Molecule: Syntheticoligonucleotide
  source 1..25: mol_type = other DNA
  modified_base order(4,8,12,17,18,19,21,23): mod_base = OTHER; note = Uracil
aactgaatacctaagatttctgtct

SEQ ID NO: 3120 - DNA, 25 bp, synthetic construct
  misc_feature 1..25: note = Description of Artificial Sequence: Syntheticoligonucleotide
  misc_feature 1..25: note = Description of Combined DNA/RNA Molecule: Syntheticoligonucleotide
  source 1..25: mol_type = other DNA
  modified_base order(1,6,7,10,11,14,15,17,18,20,21,22,23): mod_base = OTHER; note = Uracil
tgcagttgattacttcttatttttc

SEQ ID NO: 3121 - DNA, 25 bp, synthetic construct
  misc_feature 1..25: note = Description of Artificial Sequence: Syntheticoligonucleotide
  misc_feature 1..25: note = Description of Combined DNA/RNA Molecule: Syntheticoligonucleotide
  source 1..25: mol_type = other DNA
  modified_base order(5,6,9,10,13,14,16,17,19,20,21,22,23): mod_base = OTHER; note = Uracil
gcagttgattacttcttatttttct

SEQ ID NO: 3122 - RNA, 25 nt, synthetic construct
  misc_feature 1..25: note = Description of Artificial Sequence: Syntheticoligonucleotide
  source 1..25: mol_type = other RNA
ttgattacttcttatttttcttacc

SEQ ID NO: 3123 - RNA, 25 nt, synthetic construct
  misc_feature 1..25: note = Description of Artificial Sequence: Syntheticoligonucleotide
  source 1..25: mol_type = other RNA
ttcttatttttcttaccaattgtga

SEQ ID NO: 3124 - RNA, 25 nt, synthetic construct
  misc_feature 1..25: note = Description of Artificial Sequence: Syntheticoligonucleotide
  source 1..25: mol_type = other RNA
tcttatttttcttaccaattgtgaa

SEQ ID NO: 3125 - DNA, 25 bp, synthetic construct
  misc_feature 1..25: note = Description of Artificial Sequence: Syntheticoligonucleotide
  misc_feature 1..25: note = Description of Combined DNA/RNA Molecule: Syntheticoligonucleotide
  source 1..25: mol_type = other DNA
  modified_base order(2,3,5,6,7,8,9,11,12,18,19,21): mod_base = OTHER; note = Uracil
cttatttttcttaccaattgtgaat

SEQ ID NO: 3126 - RNA, 25 nt, synthetic construct
  misc_feature 1..25: note = Description of Artificial Sequence: Syntheticoligonucleotide
  source 1..25: mol_type = other RNA
atgttggtgtgaaacaaattaatga

SEQ ID NO: 3127 - RNA, 25 nt, synthetic construct
  misc_feature 1..25: note = Description of Artificial Sequence: Syntheticoligonucleotide
  source 1..25: mol_type = other RNA
ttggtgtgaaacaaattaatgaagc

SEQ ID NO: 3128 - DNA, 25 bp, synthetic construct
  misc_feature 1..25: note = Description of Artificial Sequence: Syntheticoligonucleotide
  misc_feature 1..25: note = Description of Combined DNA/RNA Molecule: Syntheticoligonucleotide
  source 1..25: mol_type = other DNA
  modified_base order(1,4,6,15,16,19): mod_base = OTHER; note = Uracil
tggtgtgaaacaaattaatgaagct

SEQ ID NO: 3129 - DNA, 25 bp, synthetic construct
  misc_feature 1..25: note = Description of Artificial Sequence: Syntheticoligonucleotide
  misc_feature 1..25: note = Description of Combined DNA/RNA Molecule: Syntheticoligonucleotide
  source 1..25: mol_type = other DNA
  modified_base order(7,8,11,17,18,19,20): mod_base = OTHER; note = Uracil
aacaaattaatgaagcttttgaatc

SEQ ID NO: 3130 - RNA, 25 nt, synthetic construct
  misc_feature 1..25: note = Description of Artificial Sequence: Syntheticoligonucleotide
  source 1..25: mol_type = other RNA
acaaattaatgaagcttttgaatca

SEQ ID NO: 3131 - RNA, 25 nt, synthetic construct
  misc_feature 1..25: note = Description of Artificial Sequence: Syntheticoligonucleotide
  source 1..25: mol_type = other RNA
tctgtgttttatctagtcacataaa

SEQ ID NO: 3132 - DNA, 25 bp, synthetic construct
  misc_feature 1..25: note = Description of Artificial Sequence: Syntheticoligonucleotide
  misc_feature 1..25: note = Description of Combined DNA/RNA Molecule: Syntheticoligonucleotide
  source 1..25: mol_type = other DNA
  modified_base order(2,4,6,7,8,9,11,13,16,21): mod_base = OTHER; note = Uracil
ctgtgttttatctagtcacataaat

SEQ ID NO: 3133 - RNA, 25 nt, synthetic construct
  misc_feature 1..25: note = Description of Artificial Sequence: Syntheticoligonucleotide
  source 1..25: mol_type = other RNA
tgttttatctagtcacataaatgga

SEQ ID NO: 3134 - DNA, 25 bp, synthetic construct
  misc_feature 1..25: note = Description of Artificial Sequence: Syntheticoligonucleotide
  misc_feature 1..25: note = Description of Combined DNA/RNA Molecule: Syntheticoligonucleotide
  source 1..25: mol_type = other DNA
  modified_base order(2,3,4,5,7,9,12,17,21): mod_base = OTHER; note = Uracil
gttttatctagtcacataaatggat

SEQ ID NO: 3135 - DNA, 25 bp, synthetic construct
  misc_feature 1..25: note = Description of Artificial Sequence: Syntheticoligonucleotide
  misc_feature 1..25: note = Description of Combined DNA/RNA Molecule: Syntheticoligonucleotide
  source 1..25: mol_type = other DNA
  modified_base order(2,4,7,12,16,20,21): mod_base = OTHER; note = Uracil
atctagtcacataaatggattaatt

SEQ ID NO: 3136 - DNA, 25 bp, synthetic construct
  misc_feature 1..25: note = Description of Artificial Sequence: Syntheticoligonucleotide
  misc_feature 1..25: note = Description of Combined DNA/RNA Molecule: Syntheticoligonucleotide
  source 1..25: mol_type = other DNA
  modified_base order(1,3,6,11,15,19,20,23): mod_base = OTHER; note = Uracil
tctagtcacataaatggattaatta

SEQ ID NO: 3137 - DNA, 25 bp, synthetic construct
  misc_feature 1..25: note = Description of Artificial Sequence: Syntheticoligonucleotide
  misc_feature 1..25: note = Description of Combined DNA/RNA Molecule: Syntheticoligonucleotide
  source 1..25: mol_type = other DNA
  modified_base order(3,7,11,12,15,16,19,22,23): mod_base = OTHER; note = Uracil
cataaatggattaattactaatttc

SEQ ID NO: 3138 - RNA, 25 nt, synthetic construct
  misc_feature 1..25: note = Description of Artificial Sequence: Syntheticoligonucleotide
  source 1..25: mol_type = other RNA
ataaatggattaattactaatttca

SEQ ID NO: 3139 - RNA, 25 nt, synthetic construct
  misc_feature 1..25: note = Description of Artificial Sequence: Syntheticoligonucleotide
  source 1..25: mol_type = other RNA
tggattaattactaatttcagttga

SEQ ID NO: 3140 - RNA, 25 nt, synthetic construct
  misc_feature 1..25: note = Description of Artificial Sequence: Syntheticoligonucleotide
  source 1..25: mol_type = other RNA
gattaattactaatttcagttgaga

SEQ ID NO: 3141 - RNA, 25 nt, synthetic construct
  misc_feature 1..25: note = Description of Artificial Sequence: Syntheticoligonucleotide
  source 1..25: mol_type = other RNA
attaattactaatttcagttgagac

SEQ ID NO: 3142 - RNA, 25 nt, synthetic construct
  misc_feature 1..25: note = Description of Artificial Sequence: Syntheticoligonucleotide
  source 1..25: mol_type = other RNA
ttaattactaatttcagttgagacc

SEQ ID NO: 3143 - RNA, 25 nt, synthetic construct
  misc_feature 1..25: note = Description of Artificial Sequence: Syntheticoligonucleotide
  source 1..25: mol_type = other RNA
taattggtttttactgaaacattga

SEQ ID NO: 3144 - RNA, 25 nt, synthetic construct
  misc_feature 1..25: note = Description of Artificial Sequence: Syntheticoligonucleotide
  source 1..25: mol_type = other RNA
tggtttttactgaaacattgaggga

SEQ ID NO: 3145 - RNA, 25 nt, synthetic construct
  misc_feature 1..25: note = Description of Artificial Sequence: Syntheticoligonucleotide
  source 1..25: mol_type = other RNA
ggtttttactgaaacattgagggaa

SEQ ID NO: 3146 - RNA, 25 nt, synthetic construct
  misc_feature 1..25: note = Description of Artificial Sequence: Syntheticoligonucleotide
  source 1..25: mol_type = other RNA
attgagggaacacaaatttatgggc

SEQ ID NO: 3147 - DNA, 25 bp, synthetic construct
  misc_feature 1..25: note = Description of Artificial Sequence: Syntheticoligonucleotide
  misc_feature 1..25: note = Description of Combined DNA/RNA Molecule: Syntheticoligonucleotide
  source 1..25: mol_type = other DNA
  modified_base order(1,2,16,17,18,20): mod_base = OTHER; note = Uracil
ttgagggaacacaaatttatgggct

SEQ ID NO: 3148 - DNA, 25 bp, synthetic construct
  misc_feature 1..25: note = Description of Artificial Sequence: Syntheticoligonucleotide
  misc_feature 1..25: note = Description of Combined DNA/RNA Molecule: Syntheticoligonucleotide
  source 1..25: mol_type = other DNA
  modified_base order(1,4,8,10,15,16,21,23): mod_base = OTHER; note = Uracil
tgatgaatgtaaagttacactgttc

SEQ ID NO: 3149 - RNA, 25 nt, synthetic construct
  misc_feature 1..25: note = Description of Artificial Sequence: Syntheticoligonucleotide
  source 1..25: mol_type = other RNA
gatgaatgtaaagttacactgttca

SEQ ID NO: 3150 - RNA, 25 nt, synthetic construct
  misc_feature 1..25: note = Description of Artificial Sequence: Syntheticoligonucleotide
  source 1..25: mol_type = other RNA
ccaaaatattatattttttctataa

SEQ ID NO: 3151 - RNA, 25 nt, synthetic construct
  misc_feature 1..25: note = Description of Artificial Sequence: Syntheticoligonucleotide
  source 1..25: mol_type = other RNA
caaaatattatattttttctataaa

SEQ ID NO: 3152 - RNA, 25 nt, synthetic construct
  misc_feature 1..25: note = Description of Artificial Sequence: Syntheticoligonucleotide
  source 1..25: mol_type = other RNA
aaaatattatattttttctataaaa

SEQ ID NO: 3153 - RNA, 25 nt, synthetic construct
  misc_feature 1..25: note = Description of Artificial Sequence: Syntheticoligonucleotide
  source 1..25: mol_type = other RNA
aaatattatattttttctataaaaa

SEQ ID NO: 3154 - RNA, 25 nt, synthetic construct
  misc_feature 1..25: note = Description of Artificial Sequence: Syntheticoligonucleotide
  source 1..25: mol_type = other RNA
atattatattttttctataaaaaga

SEQ ID NO: 3155 - RNA, 25 nt, synthetic construct
  misc_feature 1..25: note = Description of Artificial Sequence: Syntheticoligonucleotide
  source 1..25: mol_type = other RNA
tattatattttttctataaaaagaa

SEQ ID NO: 3156 - RNA, 25 nt, synthetic construct
  misc_feature 1..25: note = Description of Artificial Sequence: Syntheticoligonucleotide
  source 1..25: mol_type = other RNA
attatattttttctataaaaagaaa

SEQ ID NO: 3157 - RNA, 25 nt, synthetic construct
  misc_feature 1..25: note = Description of Artificial Sequence: Syntheticoligonucleotide
  source 1..25: mol_type = other RNA
ttatattttttctataaaaagaaaa

SEQ ID NO: 3158 - RNA, 25 nt, synthetic construct
  misc_feature 1..25: note = Description of Artificial Sequence: Syntheticoligonucleotide
  source 1..25: mol_type = other RNA
tatattttttctataaaaagaaaaa

SEQ ID NO: 3159 - RNA, 25 nt, synthetic construct
  misc_feature 1..25: note = Description of Artificial Sequence: Syntheticoligonucleotide
  source 1..25: mol_type = other RNA
atattttttctataaaaagaaaaaa

SEQ ID NO: 3160 - RNA, 25 nt, synthetic construct
  misc_feature 1..25: note = Description of Artificial Sequence: Syntheticoligonucleotide
  source 1..25: mol_type = other RNA
tattttttctataaaaagaaaaaaa

SEQ ID NO: 3161 - DNA, 25 bp, synthetic construct
  misc_feature 1..25: note = Description of Artificial Sequence: Syntheticoligonucleotide
  misc_feature 1..25: note = Description of Combined DNA/RNA Molecule: Syntheticoligonucleotide
  source 1..25: mol_type = other DNA
  modified_base order(2,3,4,5,6,7,9,11): mod_base = OTHER; note = Uracil
attttttctataaaaagaaaaaaat

SEQ ID NO: 3162 - RNA, 25 nt, synthetic construct
  misc_feature 1..25: note = Description of Artificial Sequence: Syntheticoligonucleotide
  source 1..25: mol_type = other RNA
ttctataaaaagaaaaaaatggaaa

SEQ ID NO: 3163 - RNA, 25 nt, synthetic construct
  misc_feature 1..25: note = Description of Artificial Sequence: Syntheticoligonucleotide
  source 1..25: mol_type = other RNA
tctataaaaagaaaaaaatggaaaa

SEQ ID NO: 3164 - RNA, 25 nt, synthetic construct
  misc_feature 1..25: note = Description of Artificial Sequence: Syntheticoligonucleotide
  source 1..25: mol_type = other RNA
tataaaaagaaaaaaatggaaaaaa

SEQ ID NO: 3165 - RNA, 25 nt, synthetic construct
  misc_feature 1..25: note = Description of Artificial Sequence: Syntheticoligonucleotide
  source 1..25: mol_type = other RNA
ataaaaagaaaaaaatggaaaaaaa

SEQ ID NO: 3166 - DNA, 25 bp, synthetic construct
  misc_feature 1..25: note = Description of Artificial Sequence: Syntheticoligonucleotide
  misc_feature 1..25: note = Description of Combined DNA/RNA Molecule: Syntheticoligonucleotide
  source 1..25: mol_type = other DNA
  modified_base order(1,15): mod_base = OTHER; note = Uracil
taaaaagaaaaaaatggaaaaaaat

SEQ ID NO: 3167 - DNA, 25 bp, synthetic construct
  misc_feature 1..25: note = Description of Artificial Sequence: Syntheticoligonucleotide
  misc_feature 1..25: note = Description of Combined DNA/RNA Molecule: Syntheticoligonucleotide
  source 1..25: mol_type = other DNA
  modified_base 14: mod_base = OTHER; note = Uracil
aaaaagaaaaaaatggaaaaaaatt

SEQ ID NO: 3168 - DNA, 25 bp, synthetic construct
  misc_feature 1..25: note = Description of Artificial Sequence: Syntheticoligonucleotide
  misc_feature 1..25: note = Description of Combined DNA/RNA Molecule: Syntheticoligonucleotide
  source 1..25: mol_type = other DNA
  modified_base order(13,23): mod_base = OTHER; note = Uracil
aaaagaaaaaaatggaaaaaaatta

SEQ ID NO: 3169 - RNA, 25 nt, synthetic construct
  misc_feature 1..25: note = Description of Artificial Sequence: Syntheticoligonucleotide
  source 1..25: mol_type = other RNA
aaagaaaaaaatggaaaaaaattac

SEQ ID NO: 3170 - RNA, 25 nt, synthetic construct
  misc_feature 1..25: note = Description of Artificial Sequence: Syntheticoligonucleotide
  source 1..25: mol_type = other RNA
aagaaaaaaatggaaaaaaattaca

SEQ ID NO: 3171 - RNA, 25 nt, synthetic construct
  misc_feature 1..25: note = Description of Artificial Sequence: Syntheticoligonucleotide
  source 1..25: mol_type = other RNA
aaaaaatggaaaaaaattacaaggc

SEQ ID NO: 3172 - RNA, 25 nt, synthetic construct
  misc_feature 1..25: note = Description of Artificial Sequence: Syntheticoligonucleotide
  source 1..25: mol_type = other RNA
aaaaatggaaaaaaattacaaggca

SEQ ID NO: 3173 - RNA, 25 nt, synthetic construct
  misc_feature 1..25: note = Description of Artificial Sequence: Syntheticoligonucleotide
  source 1..25: mol_type = other RNA
tggaaaaaaattacaaggcaatgga

SEQ ID NO: 3174 - RNA, 25 nt, synthetic construct
  misc_feature 1..25: note = Description of Artificial Sequence: Syntheticoligonucleotide
  source 1..25: mol_type = other RNA
ggaaaaaaattacaaggcaatggaa

SEQ ID NO: 3175 - RNA, 25 nt, synthetic construct
  misc_feature 1..25: note = Description of Artificial Sequence: Syntheticoligonucleotide
  source 1..25: mol_type = other RNA
gaaaaaaattacaaggcaatggaaa

SEQ ID NO: 3176 - RNA, 25 nt, synthetic construct
  misc_feature 1..25: note = Description of Artificial Sequence: Syntheticoligonucleotide
  source 1..25: mol_type = other RNA
gccatttccttttcacattagataa

SEQ ID NO: 3177 - DNA, 25 bp, synthetic construct
  misc_feature 1..25: note = Description of Artificial Sequence: Syntheticoligonucleotide
  misc_feature 1..25: note = Description of Combined DNA/RNA Molecule: Syntheticoligonucleotide
  source 1..25: mol_type = other DNA
  modified_base order(1,4,5,6,7,12,13,17,21,22): mod_base = OTHER; note = Uracil
tccttttcacattagataaattact

SEQ ID NO: 3178 - RNA, 25 nt, synthetic construct
  misc_feature 1..25: note = Description of Artificial Sequence: Syntheticoligonucleotide
  source 1..25: mol_type = other RNA
cacattagataaattactataaaga

SEQ ID NO: 3179 - RNA, 25 nt, synthetic construct
  misc_feature 1..25: note = Description of Artificial Sequence: Syntheticoligonucleotide
  source 1..25: mol_type = other RNA
acattagataaattactataaagac

SEQ ID NO: 3180 - DNA, 25 bp, synthetic construct
  misc_feature 1..25: note = Description of Artificial Sequence: Syntheticoligonucleotide
  misc_feature 1..25: note = Description of Combined DNA/RNA Molecule: Syntheticoligonucleotide
  source 1..25: mol_type = other DNA
  modified_base order(3,4,8,12,13,16,18): mod_base = OTHER; note = Uracil
cattagataaattactataaagact

SEQ ID NO: 3181 - RNA, 25 nt, synthetic construct
  misc_feature 1..25: note = Description of Artificial Sequence: Syntheticoligonucleotide
  source 1..25: mol_type = other RNA
agtatgaaatggggattattatagc

SEQ ID NO: 3182 - DNA, 25 bp, synthetic construct
  misc_feature 1..25: note = Description of Artificial Sequence: Syntheticoligonucleotide
  misc_feature 1..25: note = Description of Combined DNA/RNA Molecule: Syntheticoligonucleotide
  source 1..25: mol_type = other DNA
  modified_base order(1,7,8,10,11,13,22,23): mod_base = OTHER; note = Uracil
tggggattattatagcaaccatttt

SEQ ID NO: 3183 - DNA, 25 bp, synthetic construct
  misc_feature 1..25: note = Description of Artificial Sequence: Syntheticoligonucleotide
  misc_feature 1..25: note = Description of Combined DNA/RNA Molecule: Syntheticoligonucleotide
  source 1..25: mol_type = other DNA
  modified_base order(4,6,8,9,10,14,17,20): mod_base = OTHER; note = Uracil
ggctatatttacatgctactaaatt

SEQ ID NO: 3184 - DNA, 25 bp, synthetic construct
  misc_feature 1..25: note = Description of Artificial Sequence: Syntheticoligonucleotide
  misc_feature 1..25: note = Description of Combined DNA/RNA Molecule: Syntheticoligonucleotide
  source 1..25: mol_type = other DNA
  modified_base order(3,5,7,8,9,13,16,19,23): mod_base = OTHER; note = Uracil
gctatatttacatgctactaaattt

SEQ ID NO: 3185 - DNA, 25 bp, synthetic construct
  misc_feature 1..25: note = Description of Artificial Sequence: Syntheticoligonucleotide
  misc_feature 1..25: note = Description of Combined DNA/RNA Molecule: Syntheticoligonucleotide
  source 1..25: mol_type = other DNA
  modified_base order(2,4,6,7,8,12,15,18,22,23): mod_base = OTHER; note = Uracil
ctatatttacatgctactaaatttt

SEQ ID NO: 3186 - DNA, 25 bp, synthetic construct
  misc_feature 1..25: note = Description of Artificial Sequence: Syntheticoligonucleotide
  misc_feature 1..25: note = Description of Combined DNA/RNA Molecule: Syntheticoligonucleotide
  source 1..25: mol_type = other DNA
  modified_base order(1,3,5,6,7,11,14,17,21,22,23): mod_base = OTHER; note = Uracil
tatatttacatgctactaaattttt

SEQ ID NO: 3187 - DNA, 25 bp, synthetic construct
  misc_feature 1..25: note = Description of Artificial Sequence: Syntheticoligonucleotide
  misc_feature 1..25: note = Description of Combined DNA/RNA Molecule: Syntheticoligonucleotide
  source 1..25: mol_type = other DNA
  modified_base order(2,4,5,6,10,13,16,20,21,22,23): mod_base = OTHER; note = Uracil
atatttacatgctactaaattttta

SEQ ID NO: 3188 - DNA, 25 bp, synthetic construct
  misc_feature 1..25: note = Description of Artificial Sequence: Syntheticoligonucleotide
  misc_feature 1..25: note = Description of Combined DNA/RNA Molecule: Syntheticoligonucleotide
  source 1..25: mol_type = other DNA
  modified_base order(1,5,8,11,15,16,17,18,19,21): mod_base = OTHER; note = Uracil
tacatgctactaaatttttataata

SEQ ID NO: 3189 - RNA, 25 nt, synthetic construct
  misc_feature 1..25: note = Description of Artificial Sequence: Syntheticoligonucleotide
  source 1..25: mol_type = other RNA
tactaaatttttataataattgaaa

SEQ ID NO: 3190 - RNA, 25 nt, synthetic construct
  misc_feature 1..25: note = Description of Artificial Sequence: Syntheticoligonucleotide
  source 1..25: mol_type = other RNA
actaaatttttataataattgaaaa

SEQ ID NO: 3191 - RNA, 25 nt, synthetic construct
  misc_feature 1..25: note = Description of Artificial Sequence: Syntheticoligonucleotide
  source 1..25: mol_type = other RNA
taaatttttataataattgaaaaga

SEQ ID NO: 3192 - DNA, 25 bp, synthetic construct
  misc_feature 1..25: note = Description of Artificial Sequence: Syntheticoligonucleotide
  misc_feature 1..25: note = Description of Combined DNA/RNA Molecule: Syntheticoligonucleotide
  source 1..25: mol_type = other DNA
  modified_base order(4,5,6,7,8,10,13,16,17): mod_base = OTHER; note = Uracil
aaatttttataataattgaaaagat

SEQ ID NO: 3193 - DNA, 25 bp, synthetic construct
  misc_feature 1..25: note = Description of Artificial Sequence: Syntheticoligonucleotide
  misc_feature 1..25: note = Description of Combined DNA/RNA Molecule: Syntheticoligonucleotide
  source 1..25: mol_type = other DNA
  modified_base order(3,4,5,6,7,9,12,15,16): mod_base = OTHER; note = Uracil
aatttttataataattgaaaagatt

SEQ ID NO: 3194 - DNA, 25 bp, synthetic construct
  misc_feature 1..25: note = Description of Artificial Sequence: Syntheticoligonucleotide
  misc_feature 1..25: note = Description of Combined DNA/RNA Molecule: Syntheticoligonucleotide
  source 1..25: mol_type = other DNA
  modified_base order(2,3,4,5,6,8,11,14,15,23): mod_base = OTHER; note = Uracil
atttttataataattgaaaagattt

SEQ ID NO: 3195 - DNA, 25 bp, synthetic construct
  misc_feature 1..25: note = Description of Artificial Sequence: Syntheticoligonucleotide
  misc_feature 1..25: note = Description of Combined DNA/RNA Molecule: Syntheticoligonucleotide
  source 1..25: mol_type = other DNA
  modified_base order(1,2,3,4,5,7,10,13,14,22,23): mod_base = OTHER; note = Uracil
tttttataataattgaaaagatttt

SEQ ID NO: 3196 - DNA, 25 bp, synthetic construct
  misc_feature 1..25: note = Description of Artificial Sequence: Syntheticoligonucleotide
  misc_feature 1..25: note = Description of Combined DNA/RNA Molecule: Syntheticoligonucleotide
  source 1..25: mol_type = other DNA
  modified_base order(1,2,3,4,6,9,12,13,21,22,23): mod_base = OTHER; note = Uracil
ttttataataattgaaaagatttta

SEQ ID NO: 3197 - RNA, 25 nt, synthetic construct
  misc_feature 1..25: note = Description of Artificial Sequence: Syntheticoligonucleotide
  source 1..25: mol_type = other RNA
tttataataattgaaaagattttaa

SEQ ID NO: 3198 - RNA, 25 nt, synthetic construct
  misc_feature 1..25: note = Description of Artificial Sequence: Syntheticoligonucleotide
  source 1..25: mol_type = other RNA
ttataataattgaaaagattttaac

SEQ ID NO: 3199 - RNA, 25 nt, synthetic construct
  misc_feature 1..25: note = Description of Artificial Sequence: Syntheticoligonucleotide
  source 1..25: mol_type = other RNA
tataataattgaaaagattttaaca

SEQ ID NO: 3200 - DNA, 25 bp, synthetic construct
  misc_feature 1..25: note = Description of Artificial Sequence: Syntheticoligonucleotide
  misc_feature 1..25: note = Description of Combined DNA/RNA Molecule: Syntheticoligonucleotide
  source 1..25: mol_type = other DNA
  modified_base order(2,5,6,14,15,16,17): mod_base = OTHER; note = Uracil
ataattgaaaagattttaacaagta

SEQ ID NO: 3201 - DNA, 25 bp, synthetic construct
  misc_feature 1..25: note = Description of Artificial Sequence: Syntheticoligonucleotide
  misc_feature 1..25: note = Description of Combined DNA/RNA Molecule: Syntheticoligonucleotide
  source 1..25: mol_type = other DNA
  modified_base order(1,4,5,13,14,15,16,23): mod_base = OTHER; note = Uracil
taattgaaaagattttaacaagtat

SEQ ID NO: 3202 - RNA, 25 nt, synthetic construct
  misc_feature 1..25: note = Description of Artificial Sequence: Syntheticoligonucleotide
  source 1..25: mol_type = other RNA
attgaaaagattttaacaagtataa

SEQ ID NO: 3203 - RNA, 25 nt, synthetic construct
  misc_feature 1..25: note = Description of Artificial Sequence: Syntheticoligonucleotide
  source 1..25: mol_type = other RNA
ttgaaaagattttaacaagtataaa

SEQ ID NO: 3204 - RNA, 25 nt, synthetic construct
  misc_feature 1..25: note = Description of Artificial Sequence: Syntheticoligonucleotide
  source 1..25: mol_type = other RNA
tgaaaagattttaacaagtataaaa

SEQ ID NO: 3205 - RNA, 25 nt, synthetic construct
  misc_feature 1..25: note = Description of Artificial Sequence: Syntheticoligonucleotide
  source 1..25: mol_type = other RNA
gaaaagattttaacaagtataaaaa

SEQ ID NO: 3206 - RNA, 25 nt, synthetic construct
  misc_feature 1..25: note = Description of Artificial Sequence: Syntheticoligonucleotide
  source 1..25: mol_type = other RNA
aaaagattttaacaagtataaaaaa

SEQ ID NO: 3207 - DNA, 25 bp, synthetic construct
  misc_feature 1..25: note = Description of Artificial Sequence: Syntheticoligonucleotide
  misc_feature 1..25: note = Description of Combined DNA/RNA Molecule: Syntheticoligonucleotide
  source 1..25: mol_type = other DNA
  modified_base order(6,7,8,9,16,18): mod_base = OTHER; note = Uracil
aaagattttaacaagtataaaaaat

SEQ ID NO: 3208 - DNA, 25 bp, synthetic construct
  misc_feature 1..25: note = Description of Artificial Sequence: Syntheticoligonucleotide
  misc_feature 1..25: note = Description of Combined DNA/RNA Molecule: Syntheticoligonucleotide
  source 1..25: mol_type = other DNA
  modified_base order(5,6,7,8,15,17): mod_base = OTHER; note = Uracil
aagattttaacaagtataaaaaatt

SEQ ID NO: 3209 - DNA, 25 bp, synthetic construct
  misc_feature 1..25: note = Description of Artificial Sequence: Syntheticoligonucleotide
  misc_feature 1..25: note = Description of Combined DNA/RNA Molecule: Syntheticoligonucleotide
  source 1..25: mol_type = other DNA
  modified_base order(4,5,6,7,14,16,23): mod_base = OTHER; note = Uracil
agattttaacaagtataaaaaattc

SEQ ID NO: 3210 - DNA, 25 bp, synthetic construct
  misc_feature 1..25: note = Description of Artificial Sequence: Syntheticoligonucleotide
  misc_feature 1..25: note = Description of Combined DNA/RNA Molecule: Syntheticoligonucleotide
  source 1..25: mol_type = other DNA
  modified_base order(3,4,5,6,13,15,22,23): mod_base = OTHER; note = Uracil
gattttaacaagtataaaaaattct

SEQ ID NO: 3211 - RNA, 25 nt, synthetic construct
  misc_feature 1..25: note = Description of Artificial Sequence: Syntheticoligonucleotide
  source 1..25: mol_type = other RNA
acaagtataaaaaattctcatagga

SEQ ID NO: 3212 - RNA, 25 nt, synthetic construct
  misc_feature 1..25: note = Description of Artificial Sequence: Syntheticoligonucleotide
  source 1..25: mol_type = other RNA
caagtataaaaaattctcataggaa

SEQ ID NO: 3213 - DNA, 25 bp, synthetic construct
  misc_feature 1..25: note = Description of Artificial Sequence: Syntheticoligonucleotide
  misc_feature 1..25: note = Description of Combined DNA/RNA Molecule: Syntheticoligonucleotide
  source 1..25: mol_type = other DNA
  modified_base order(4,6,13,14,16,19): mod_base = OTHER; note = Uracil
aagtataaaaaattctcataggaat

SEQ ID NO: 3214 - DNA, 25 bp, synthetic construct
  misc_feature 1..25: note = Description of Artificial Sequence: Syntheticoligonucleotide
  misc_feature 1..25: note = Description of Combined DNA/RNA Molecule: Syntheticoligonucleotide
  source 1..25: mol_type = other DNA
  modified_base order(3,5,12,13,15,18): mod_base = OTHER; note = Uracil
agtataaaaaattctcataggaatt

SEQ ID NO: 3215 - DNA, 25 bp, synthetic construct
  misc_feature 1..25: note = Description of Artificial Sequence: Syntheticoligonucleotide
  misc_feature 1..25: note = Description of Combined DNA/RNA Molecule: Syntheticoligonucleotide
  source 1..25: mol_type = other DNA
  modified_base order(2,4,11,12,14,17,23): mod_base = OTHER; note = Uracil
gtataaaaaattctcataggaatta

SEQ ID NO: 3216 - RNA, 25 nt, synthetic construct
  misc_feature 1..25: note = Description of Artificial Sequence: Syntheticoligonucleotide
  source 1..25: mol_type = other RNA
tataaaaaattctcataggaattaa

SEQ ID NO: 3217 - RNA, 25 nt, synthetic construct
  misc_feature 1..25: note = Description of Artificial Sequence: Syntheticoligonucleotide
  source 1..25: mol_type = other RNA
ataaaaaattctcataggaattaaa

SEQ ID NO: 3218 - DNA, 25 bp, synthetic construct
  misc_feature 1..25: note = Description of Artificial Sequence: Syntheticoligonucleotide
  misc_feature 1..25: note = Description of Combined DNA/RNA Molecule: Syntheticoligonucleotide
  source 1..25: mol_type = other DNA
  modified_base order(1,8,9,11,14,20,21): mod_base = OTHER; note = Uracil
taaaaaattctcataggaattaaat

SEQ ID NO: 3219 - DNA, 25 bp, synthetic construct
  misc_feature 1..25: note = Description of Artificial Sequence: Syntheticoligonucleotide
  misc_feature 1..25: note = Description of Combined DNA/RNA Molecule: Syntheticoligonucleotide
  source 1..25: mol_type = other DNA
  modified_base order(6,7,9,12,18,19,23): mod_base = OTHER; note = Uracil
aaaaattctcataggaattaaatgt

SEQ ID NO: 3220 - DNA, 25 bp, synthetic construct
  misc_feature 1..25: note = Description of Artificial Sequence: Syntheticoligonucleotide
  misc_feature 1..25: note = Description of Combined DNA/RNA Molecule: Syntheticoligonucleotide
  source 1..25: mol_type = other DNA
  modified_base order(5,6,8,11,17,18,22): mod_base = OTHER; note = Uracil
aaaattctcataggaattaaatgta

SEQ ID NO: 3221 - DNA, 25 bp, synthetic construct
  misc_feature 1..25: note = Description of Artificial Sequence: Syntheticoligonucleotide
  misc_feature 1..25: note = Description of Combined DNA/RNA Molecule: Syntheticoligonucleotide
  source 1..25: mol_type = other DNA
  modified_base order(2,4,5,6,9,12,14,18,19,20): mod_base = OTHER; note = Uracil
ctctttcatagtataactttaaatc

SEQ ID NO: 3222 - DNA, 25 bp, synthetic construct
  misc_feature 1..25: note = Description of Artificial Sequence: Syntheticoligonucleotide
  misc_feature 1..25: note = Description of Combined DNA/RNA Molecule: Syntheticoligonucleotide
  source 1..25: mol_type = other DNA
  modified_base order(1,4,7,9,13,14,15,19,21,22,23): mod_base = OTHER; note = Uracil
tcatagtataactttaaatcttttc

SEQ ID NO: 3223 - DNA, 25 bp, synthetic construct
  misc_feature 1..25: note = Description of Artificial Sequence: Syntheticoligonucleotide
  misc_feature 1..25: note = Description of Combined DNA/RNA Molecule: Syntheticoligonucleotide
  source 1..25: mol_type = other DNA
  modified_base order(3,6,8,12,13,14,18,20,21,22,23): mod_base = OTHER; note = Uracil
catagtataactttaaatcttttct

SEQ ID NO: 3224 - DNA, 25 bp, synthetic construct
  misc_feature 1..25: note = Description of Artificial Sequence: Syntheticoligonucleotide
  misc_feature 1..25: note = Description of Combined DNA/RNA Molecule: Syntheticoligonucleotide
  source 1..25: mol_type = other DNA
  modified_base order(1,2,3,7,9,10,11,12,14,15,20,21): mod_base = OTHER; note = Uracil
tttaaatcttttcttcaacttgagt

SEQ ID NO: 3225 - DNA, 25 bp, synthetic construct
  misc_feature 1..25: note = Description of Artificial Sequence: Syntheticoligonucleotide
  misc_feature 1..25: note = Description of Combined DNA/RNA Molecule: Syntheticoligonucleotide
  source 1..25: mol_type = other DNA
  modified_base order(1,2,6,8,9,10,11,13,14,19,20): mod_base = OTHER; note = Uracil
ttaaatcttttcttcaacttgagtc

SEQ ID NO: 3226 - DNA, 25 bp, synthetic construct
  misc_feature 1..25: note = Description of Artificial Sequence: Syntheticoligonucleotide
  misc_feature 1..25: note = Description of Combined DNA/RNA Molecule: Syntheticoligonucleotide
  source 1..25: mol_type = other DNA
  modified_base order(4,5,9,11,12,13,19,22,23): mod_base = OTHER; note = Uracil
aacttgagtctttgaagatagtttt

SEQ ID NO: 3227 - RNA, 25 nt, synthetic construct
  misc_feature 1..25: note = Description of Artificial Sequence: Syntheticoligonucleotide
  source 1..25: mol_type = other RNA
cttgagtctttgaagatagttttaa

SEQ ID NO: 3228 - DNA, 25 bp, synthetic construct
  misc_feature 1..25: note = Description of Artificial Sequence: Syntheticoligonucleotide
  misc_feature 1..25: note = Description of Combined DNA/RNA Molecule: Syntheticoligonucleotide
  source 1..25: mol_type = other DNA
  modified_base order(1,2,6,8,9,10,16,19,20,21,22): mod_base = OTHER; note = Uracil
ttgagtctttgaagatagttttaat

SEQ ID NO: 3229 - RNA, 25 nt, synthetic construct
  misc_feature 1..25: note = Description of Artificial Sequence: Syntheticoligonucleotide
  source 1..25: mol_type = other RNA
aagatagttttaattctgcttgtga

SEQ ID NO: 3230 - RNA, 25 nt, synthetic construct
  misc_feature 1..25: note = Description of Artificial Sequence: Syntheticoligonucleotide
  source 1..25: mol_type = other RNA
agatagttttaattctgcttgtgac

SEQ ID NO: 3231 - RNA, 25 nt, synthetic construct
  misc_feature 1..25: note = Description of Artificial Sequence: Syntheticoligonucleotide
  source 1..25: mol_type = other RNA
gatagttttaattctgcttgtgaca

SEQ ID NO: 3232 - DNA, 25 bp, synthetic construct
  misc_feature 1..25: note = Description of Artificial Sequence: Syntheticoligonucleotide
  misc_feature 1..25: note = Description of Combined DNA/RNA Molecule: Syntheticoligonucleotide
  source 1..25: mol_type = other DNA
  modified_base order(1,4,5,7,12,13,20,21,23): mod_base = OTHER; note = Uracil
tgcttgtgacattaaaagattattt

SEQ ID NO: 3233 - RNA, 25 nt, synthetic construct
  misc_feature 1..25: note = Description of Artificial Sequence: Syntheticoligonucleotide
  source 1..25: mol_type = other RNA
agcattgcttttgtttcttaagaaa

SEQ ID NO: 3234 - RNA, 25 nt, synthetic construct
  misc_feature 1..25: note = Description of Artificial Sequence: Syntheticoligonucleotide
  source 1..25: mol_type = other RNA
gcattgcttttgtttcttaagaaaa

SEQ ID NO: 3235 - DNA, 25 bp, synthetic construct
  misc_feature 1..25: note = Description of Artificial Sequence: Syntheticoligonucleotide
  misc_feature 1..25: note = Description of Combined DNA/RNA Molecule: Syntheticoligonucleotide
  source 1..25: mol_type = other DNA
  modified_base order(2,3,4,5,7,8,9,11,12): mod_base = OTHER; note = Uracil
cttttgtttcttaagaaaacaaact

SEQ ID NO: 3236 - DNA, 25 bp, synthetic construct
  misc_feature 1..25: note = Description of Artificial Sequence: Syntheticoligonucleotide
  misc_feature 1..25: note = Description of Combined DNA/RNA Molecule: Syntheticoligonucleotide
  source 1..25: mol_type = other DNA
  modified_base order(1,2,4,5,18,20,21,22,23): mod_base = OTHER; note = Uracil
ttcttaagaaaacaaactctttttt

SEQ ID NO: 3237 - DNA, 25 bp, synthetic construct
  misc_feature 1..25: note = Description of Artificial Sequence: Syntheticoligonucleotide
  misc_feature 1..25: note = Description of Combined DNA/RNA Molecule: Syntheticoligonucleotide
  source 1..25: mol_type = other DNA
  modified_base order(1,3,4,17,19,20,21,22,23): mod_base = OTHER; note = Uracil
tcttaagaaaacaaactctttttta

SEQ ID NO: 3238 - RNA, 25 nt, synthetic construct
  misc_feature 1..25: note = Description of Artificial Sequence: Syntheticoligonucleotide
  source 1..25: mol_type = other RNA
cttaagaaaacaaactcttttttaa

SEQ ID NO: 3239 - RNA, 25 nt, synthetic construct
  misc_feature 1..25: note = Description of Artificial Sequence: Syntheticoligonucleotide
  source 1..25: mol_type = other RNA
ttaagaaaacaaactcttttttaaa

SEQ ID NO: 3240 - RNA, 25 nt, synthetic construct
  misc_feature 1..25: note = Description of Artificial Sequence: Syntheticoligonucleotide
  source 1..25: mol_type = other RNA
taagaaaacaaactcttttttaaaa

SEQ ID NO: 3241 - RNA, 25 nt, synthetic construct
  misc_feature 1..25: note = Description of Artificial Sequence: Syntheticoligonucleotide
  source 1..25: mol_type = other RNA
aagaaaacaaactcttttttaaaaa

SEQ ID NO: 3242 - DNA, 25 bp, synthetic construct
  misc_feature 1..25: note = Description of Artificial Sequence: Syntheticoligonucleotide
  misc_feature 1..25: note = Description of Combined DNA/RNA Molecule: Syntheticoligonucleotide
  source 1..25: mol_type = other DNA
  modified_base order(12,14,15,16,17,18,19): mod_base = OTHER; note = Uracil
agaaaacaaactcttttttaaaaat

SEQ ID NO: 3243 - DNA, 25 bp, synthetic construct
  misc_feature 1..25: note = Description of Artificial Sequence: Syntheticoligonucleotide
  misc_feature 1..25: note = Description of Combined DNA/RNA Molecule: Syntheticoligonucleotide
  source 1..25: mol_type = other DNA
  modified_base order(8,10,11,12,13,14,15,21,22): mod_base = OTHER; note = Uracil
aacaaactcttttttaaaaattact

SEQ ID NO: 3244 - RNA, 25 nt, synthetic construct
  misc_feature 1..25: note = Description of Artificial Sequence: Syntheticoligonucleotide
  source 1..25: mol_type = other RNA
ctcttttttaaaaattacttttaaa

SEQ ID NO: 3245 - DNA, 25 bp, synthetic construct
  misc_feature 1..25: note = Description of Artificial Sequence: Syntheticoligonucleotide
  misc_feature 1..25: note = Description of Combined DNA/RNA Molecule: Syntheticoligonucleotide
  source 1..25: mol_type = other DNA
  modified_base order(1,3,4,5,6,7,8,14,15,18,19,20,21): mod_base = OTHER; note = Uracil
tcttttttaaaaattacttttaaat

SEQ ID NO: 3246 - DNA, 25 bp, synthetic construct
  misc_feature 1..25: note = Description of Artificial Sequence: Syntheticoligonucleotide
  misc_feature 1..25: note = Description of Combined DNA/RNA Molecule: Syntheticoligonucleotide
  source 1..25: mol_type = other DNA
  modified_base order(2,3,4,5,6,7,13,14,17,18,19,20): mod_base = OTHER; note = Uracil
cttttttaaaaattacttttaaata

SEQ ID NO: 3247 - DNA, 25 bp, synthetic construct
  misc_feature 1..25: note = Description of Artificial Sequence: Syntheticoligonucleotide
  misc_feature 1..25: note = Description of Combined DNA/RNA Molecule: Syntheticoligonucleotide
  source 1..25: mol_type = other DNA
  modified_base order(1,2,3,4,5,6,12,13,16,17,18,19,23): mod_base = OTHER; note = Uracil
ttttttaaaaattacttttaaatat

SEQ ID NO: 3248 - DNA, 25 bp, synthetic construct
  misc_feature 1..25: note = Description of Artificial Sequence: Syntheticoligonucleotide
  misc_feature 1..25: note = Description of Combined DNA/RNA Molecule: Syntheticoligonucleotide
  source 1..25: mol_type = other DNA
  modified_base order(1,2,3,4,5,11,12,15,16,17,18,22): mod_base = OTHER; note = Uracil
tttttaaaaattacttttaaatatt

SEQ ID NO: 3249 - DNA, 25 bp, synthetic construct
  misc_feature 1..25: note = Description of Artificial Sequence: Syntheticoligonucleotide
  misc_feature 1..25: note = Description of Combined DNA/RNA Molecule: Syntheticoligonucleotide
  source 1..25: mol_type = other DNA
  modified_base order(1,2,3,4,10,11,14,15,16,17,21,23): mod_base = OTHER; note = Uracil
ttttaaaaattacttttaaatatta

SEQ ID NO: 3250 - RNA, 25 nt, synthetic construct
  misc_feature 1..25: note = Description of Artificial Sequence: Syntheticoligonucleotide
  source 1..25: mol_type = other RNA
tttaaaaattacttttaaatattaa

SEQ ID NO: 3251 - RNA, 25 nt, synthetic construct
  misc_feature 1..25: note = Description of Artificial Sequence: Syntheticoligonucleotide
  source 1..25: mol_type = other RNA
ttaaaaattacttttaaatattaac

SEQ ID NO: 3252 - DNA, 25 bp, synthetic construct
  misc_feature 1..25: note = Description of Artificial Sequence: Syntheticoligonucleotide
  misc_feature 1..25: note = Description of Combined DNA/RNA Molecule: Syntheticoligonucleotide
  source 1..25: mol_type = other DNA
  modified_base order(1,7,8,11,12,13,14,18,20,21): mod_base = OTHER; note = Uracil
taaaaattacttttaaatattaact

SEQ ID NO: 3253 - DNA, 25 bp, synthetic construct
  misc_feature 1..25: note = Description of Artificial Sequence: Syntheticoligonucleotide
  misc_feature 1..25: note = Description of Combined DNA/RNA Molecule: Syntheticoligonucleotide
  source 1..25: mol_type = other DNA
  modified_base order(1,4,5,6,7,11,13,14,18): mod_base = OTHER; note = Uracil
tacttttaaatattaactcaaaagt

SEQ ID NO: 3254 - DNA, 25 bp, synthetic construct
  misc_feature 1..25: note = Description of Artificial Sequence: Syntheticoligonucleotide
  misc_feature 1..25: note = Description of Combined DNA/RNA Molecule: Syntheticoligonucleotide
  source 1..25: mol_type = other DNA
  modified_base order(3,4,5,6,10,12,13,17): mod_base = OTHER; note = Uracil
acttttaaatattaactcaaaagtt

SEQ ID NO: 3255 - RNA, 25 nt, synthetic construct
  misc_feature 1..25: note = Description of Artificial Sequence: Syntheticoligonucleotide
  source 1..25: mol_type = other RNA
ttttaaatattaactcaaaagttga

SEQ ID NO: 3256 - RNA, 25 nt, synthetic construct
  misc_feature 1..25: note = Description of Artificial Sequence: Syntheticoligonucleotide
  source 1..25: mol_type = other RNA
ttaaatattaactcaaaagttgaga

SEQ ID NO: 3257 - DNA, 25 bp, synthetic construct
  misc_feature 1..25: note = Description of Artificial Sequence: Syntheticoligonucleotide
  misc_feature 1..25: note = Description of Combined DNA/RNA Molecule: Syntheticoligonucleotide
  source 1..25: mol_type = other DNA
  modified_base order(1,5,7,8,12,19,20): mod_base = OTHER; note = Uracil
taaatattaactcaaaagttgagat

SEQ ID NO: 3258 - DNA, 25 bp, synthetic construct
  misc_feature 1..25: note = Description of Artificial Sequence: Syntheticoligonucleotide
  misc_feature 1..25: note = Description of Combined DNA/RNA Molecule: Syntheticoligonucleotide
  source 1..25: mol_type = other DNA
  modified_base order(4,6,7,11,18,19): mod_base = OTHER; note = Uracil
aaatattaactcaaaagttgagatt

SEQ ID NO: 3259 - DNA, 25 bp, synthetic construct
  misc_feature 1..25: note = Description of Artificial Sequence: Syntheticoligonucleotide
  misc_feature 1..25: note = Description of Combined DNA/RNA Molecule: Syntheticoligonucleotide
  source 1..25: mol_type = other DNA
  modified_base order(3,5,6,10,17,18,23): mod_base = OTHER; note = Uracil
aatattaactcaaaagttgagattt

SEQ ID NO: 3260 - DNA, 25 bp, synthetic construct
  misc_feature 1..25: note = Description of Artificial Sequence: Syntheticoligonucleotide
  misc_feature 1..25: note = Description of Combined DNA/RNA Molecule: Syntheticoligonucleotide
  source 1..25: mol_type = other DNA
  modified_base order(3,5,15,16,19,20,21,22,23): mod_base = OTHER; note = Uracil
ggtgtgccaagacattaattttttt

SEQ ID NO: 3261 - RNA, 25 nt, synthetic construct
  misc_feature 1..25: note = Description of Artificial Sequence: Syntheticoligonucleotide
  source 1..25: mol_type = other RNA
gccaagacattaattttttttttaa

SEQ ID NO: 3262 - RNA, 25 nt, synthetic construct
  misc_feature 1..25: note = Description of Artificial Sequence: Syntheticoligonucleotide
  source 1..25: mol_type = other RNA
ccaagacattaattttttttttaaa

SEQ ID NO: 3263 - RNA, 25 nt, synthetic construct
  misc_feature 1..25: note = Description of Artificial Sequence: Syntheticoligonucleotide
  source 1..25: mol_type = other RNA
cattaattttttttttaaacaatga

SEQ ID NO: 3264 - RNA, 25 nt, synthetic construct
  misc_feature 1..25: note = Description of Artificial Sequence: Syntheticoligonucleotide
  source 1..25: mol_type = other RNA
attaattttttttttaaacaatgaa

SEQ ID NO: 3265 - DNA, 25 bp, synthetic construct
  misc_feature 1..25: note = Description of Artificial Sequence: Syntheticoligonucleotide
  misc_feature 1..25: note = Description of Combined DNA/RNA Molecule: Syntheticoligonucleotide
  source 1..25: mol_type = other DNA
  modified_base order(1,4,5,6,7,8,9,10,11,12,13,20): mod_base = OTHER; note = Uracil
taattttttttttaaacaatgaagt

SEQ ID NO: 3266 - RNA, 25 nt, synthetic construct
  misc_feature 1..25: note = Description of Artificial Sequence: Syntheticoligonucleotide
  source 1..25: mol_type = other RNA
attttttttttaaacaatgaagtga

SEQ ID NO: 3267 - RNA, 25 nt, synthetic construct
  misc_feature 1..25: note = Description of Artificial Sequence: Syntheticoligonucleotide
  source 1..25: mol_type = other RNA
ttttttttttaaacaatgaagtgaa

SEQ ID NO: 3268 - RNA, 25 nt, synthetic construct
  misc_feature 1..25: note = Description of Artificial Sequence: Syntheticoligonucleotide
  source 1..25: mol_type = other RNA
tttttttttaaacaatgaagtgaaa

SEQ ID NO: 3269 - RNA, 25 nt, synthetic construct
  misc_feature 1..25: note = Description of Artificial Sequence: Syntheticoligonucleotide
  source 1..25: mol_type = other RNA
ttttttttaaacaatgaagtgaaaa

SEQ ID NO: 3270 - RNA, 25 nt, synthetic construct
  misc_feature 1..25: note = Description of Artificial Sequence: Syntheticoligonucleotide
  source 1..25: mol_type = other RNA
tttttttaaacaatgaagtgaaaaa

SEQ ID NO: 3271 - DNA, 25 bp, synthetic construct
  misc_feature 1..25: note = Description of Artificial Sequence: Syntheticoligonucleotide
  misc_feature 1..25: note = Description of Combined DNA/RNA Molecule: Syntheticoligonucleotide
  source 1..25: mol_type = other DNA
  modified_base order(1,2,3,4,5,12,17): mod_base = OTHER; note = Uracil
tttttaaacaatgaagtgaaaaagt

SEQ ID NO: 3272 - DNA, 25 bp, synthetic construct
  misc_feature 1..25: note = Description of Artificial Sequence: Syntheticoligonucleotide
  misc_feature 1..25: note = Description of Combined DNA/RNA Molecule: Syntheticoligonucleotide
  source 1..25: mol_type = other DNA
  modified_base order(1,2,3,4,11,16): mod_base = OTHER; note = Uracil
ttttaaacaatgaagtgaaaaagtt

SEQ ID NO: 3273 - DNA, 25 bp, synthetic construct
  misc_feature 1..25: note = Description of Artificial Sequence: Syntheticoligonucleotide
  misc_feature 1..25: note = Description of Combined DNA/RNA Molecule: Syntheticoligonucleotide
  source 1..25: mol_type = other DNA
  modified_base order(1,2,3,10,15,23): mod_base = OTHER; note = Uracil
tttaaacaatgaagtgaaaaagttt

SEQ ID NO: 3274 - DNA, 25 bp, synthetic construct
  misc_feature 1..25: note = Description of Artificial Sequence: Syntheticoligonucleotide
  misc_feature 1..25: note = Description of Combined DNA/RNA Molecule: Syntheticoligonucleotide
  source 1..25: mol_type = other DNA
  modified_base order(2,7,15,16,17,18,23): mod_base = OTHER; note = Uracil
atgaagtgaaaaagttttacaatct

SEQ ID NO: 3275 - DNA, 25 bp, synthetic construct
  misc_feature 1..25: note = Description of Artificial Sequence: Syntheticoligonucleotide
  misc_feature 1..25: note = Description of Combined DNA/RNA Molecule: Syntheticoligonucleotide
  source 1..25: mol_type = other DNA
  modified_base order(1,9,10,11,12,17,19,21): mod_base = OTHER; note = Uracil
tgaaaaagttttacaatctctaggt

SEQ ID NO: 3276 - DNA, 25 bp, synthetic construct
  misc_feature 1..25: note = Description of Artificial Sequence: Syntheticoligonucleotide
  misc_feature 1..25: note = Description of Combined DNA/RNA Molecule: Syntheticoligonucleotide
  source 1..25: mol_type = other DNA
  modified_base order(8,9,10,11,16,18,20): mod_base = OTHER; note = Uracil
gaaaaagttttacaatctctaggtt

SEQ ID NO: 3277 - DNA, 25 bp, synthetic construct
  misc_feature 1..25: note = Description of Artificial Sequence: Syntheticoligonucleotide
  misc_feature 1..25: note = Description of Combined DNA/RNA Molecule: Syntheticoligonucleotide
  source 1..25: mol_type = other DNA
  modified_base order(7,8,9,10,15,17,19,23): mod_base = OTHER; note = Uracil
aaaaagttttacaatctctaggttt

SEQ ID NO: 3278 - RNA, 25 nt, synthetic construct
  misc_feature 1..25: note = Description of Artificial Sequence: Syntheticoligonucleotide
  source 1..25: mol_type = other RNA
actggttaaattaacattgcataaa

SEQ ID NO: 3279 - RNA, 25 nt, synthetic construct
  misc_feature 1..25: note = Description of Artificial Sequence: Syntheticoligonucleotide
  source 1..25: mol_type = other RNA
ctggttaaattaacattgcataaac

SEQ ID NO: 3280 - RNA, 25 nt, synthetic construct
  misc_feature 1..25: note = Description of Artificial Sequence: Syntheticoligonucleotide
  source 1..25: mol_type = other RNA
tggttaaattaacattgcataaaca

SEQ ID NO: 3281 - DNA, 25 bp, synthetic construct
  misc_feature 1..25: note = Description of Artificial Sequence: Syntheticoligonucleotide
  misc_feature 1..25: note = Description of Combined DNA/RNA Molecule: Syntheticoligonucleotide
  source 1..25: mol_type = other DNA
  modified_base order(4,5,9,16,17,18,19): mod_base = OTHER; note = Uracil
acattgcataaacacttttcaagtc

SEQ ID NO: 3282 - DNA, 25 bp, synthetic construct
  misc_feature 1..25: note = Description of Artificial Sequence: Syntheticoligonucleotide
  misc_feature 1..25: note = Description of Combined DNA/RNA Molecule: Syntheticoligonucleotide
  source 1..25: mol_type = other DNA
  modified_base order(1,6,8,11,15,17,18,19,22): mod_base = OTHER; note = Uracil
tcaagtctgatccatatttaataat

SEQ ID NO: 3283 - DNA, 25 bp, synthetic construct
  misc_feature 1..25: note = Description of Artificial Sequence: Syntheticoligonucleotide
  misc_feature 1..25: note = Description of Combined DNA/RNA Molecule: Syntheticoligonucleotide
  source 1..25: mol_type = other DNA
  modified_base order(1,5,7,8,9,12,15,18,19,20): mod_base = OTHER; note = Uracil
tccatatttaataatgctttaaaat

SEQ ID NO: 3284 - DNA, 25 bp, synthetic construct
  misc_feature 1..25: note = Description of Artificial Sequence: Syntheticoligonucleotide
  misc_feature 1..25: note = Description of Combined DNA/RNA Molecule: Syntheticoligonucleotide
  source 1..25: mol_type = other DNA
  modified_base order(4,6,7,8,11,14,17,18,19): mod_base = OTHER; note = Uracil
ccatatttaataatgctttaaaata

SEQ ID NO: 3285 - RNA, 25 nt, synthetic construct
  misc_feature 1..25: note = Description of Artificial Sequence: Syntheticoligonucleotide
  source 1..25: mol_type = other RNA
catatttaataatgctttaaaataa

SEQ ID NO: 3286 - RNA, 25 nt, synthetic construct
  misc_feature 1..25: note = Description of Artificial Sequence: Syntheticoligonucleotide
  source 1..25: mol_type = other RNA
atatttaataatgctttaaaataaa

SEQ ID NO: 3287 - RNA, 25 nt, synthetic construct
  misc_feature 1..25: note = Description of Artificial Sequence: Syntheticoligonucleotide
  source 1..25: mol_type = other RNA
tatttaataatgctttaaaataaaa

SEQ ID NO: 3288 - RNA, 25 nt, synthetic construct
  misc_feature 1..25: note = Description of Artificial Sequence: Syntheticoligonucleotide
  source 1..25: mol_type = other RNA
atttaataatgctttaaaataaaaa

SEQ ID NO: 3289 - DNA, 25 bp, synthetic construct
  misc_feature 1..25: note = Description of Artificial Sequence: Syntheticoligonucleotide
  misc_feature 1..25: note = Description of Combined DNA/RNA Molecule: Syntheticoligonucleotide
  source 1..25: mol_type = other DNA
  modified_base order(1,2,5,8,11,12,13,18): mod_base = OTHER; note = Uracil
ttaataatgctttaaaataaaaata

SEQ ID NO: 3290 - RNA, 25 nt, synthetic construct
  misc_feature 1..25: note = Description of Artificial Sequence: Syntheticoligonucleotide
  source 1..25: mol_type = other RNA
taataatgctttaaaataaaaataa

SEQ ID NO: 3291 - RNA, 25 nt, synthetic construct
  misc_feature 1..25: note = Description of Artificial Sequence: Syntheticoligonucleotide
  source 1..25: mol_type = other RNA
aataatgctttaaaataaaaataaa

SEQ ID NO: 3292 - RNA, 25 nt, synthetic construct
  misc_feature 1..25: note = Description of Artificial Sequence: Syntheticoligonucleotide
  source 1..25: mol_type = other RNA
ataatgctttaaaataaaaataaaa

SEQ ID NO: 3293 - RNA, 25 nt, synthetic construct
  misc_feature 1..25: note = Description of Artificial Sequence: Syntheticoligonucleotide
  source 1..25: mol_type = other RNA
tttaaaataaaaataaaaacaatcc

SEQ ID NO: 3294 - RNA, 25 nt, synthetic construct
  misc_feature 1..25: note = Description of Artificial Sequence: Syntheticoligonucleotide
  source 1..25: mol_type = other RNA
ataaaaataaaaacaatccttttga

SEQ ID NO: 3295 - DNA, 25 bp, synthetic construct
  misc_feature 1..25: note = Description of Artificial Sequence: Syntheticoligonucleotide
  misc_feature 1..25: note = Description of Combined DNA/RNA Molecule: Syntheticoligonucleotide
  source 1..25: mol_type = other DNA
  modified_base order(1,7,16,19,20,21,22): mod_base = OTHER; note = Uracil
taaaaataaaaacaatccttttgat

SEQ ID NO: 3296 - DNA, 25 bp, synthetic construct
  misc_feature 1..25: note = Description of Artificial Sequence: Syntheticoligonucleotide
  misc_feature 1..25: note = Description of Combined DNA/RNA Molecule: Syntheticoligonucleotide
  source 1..25: mol_type = other DNA
  modified_base order(6,15,18,19,20,21): mod_base = OTHER; note = Uracil
aaaaataaaaacaatccttttgata

SEQ ID NO: 3297 - RNA, 25 nt, synthetic construct
  misc_feature 1..25: note = Description of Artificial Sequence: Syntheticoligonucleotide
  source 1..25: mol_type = other RNA
aaaataaaaacaatccttttgataa

SEQ ID NO: 3298 - RNA, 25 nt, synthetic construct
  misc_feature 1..25: note = Description of Artificial Sequence: Syntheticoligonucleotide
  source 1..25: mol_type = other RNA
aaataaaaacaatccttttgataaa

SEQ ID NO: 3299 - DNA, 25 bp, synthetic construct
  misc_feature 1..25: note = Description of Artificial Sequence: Syntheticoligonucleotide
  misc_feature 1..25: note = Description of Combined DNA/RNA Molecule: Syntheticoligonucleotide
  source 1..25: mol_type = other DNA
  modified_base order(3,12,15,16,17,18,21): mod_base = OTHER; note = Uracil
aataaaaacaatccttttgataaat

SEQ ID NO: 3300 - DNA, 25 bp, synthetic construct
  misc_feature 1..25: note = Description of Artificial Sequence: Syntheticoligonucleotide
  misc_feature 1..25: note = Description of Combined DNA/RNA Molecule: Syntheticoligonucleotide
  source 1..25: mol_type = other DNA
  modified_base order(2,11,14,15,16,17,20): mod_base = OTHER; note = Uracil
ataaaaacaatccttttgataaatt

SEQ ID NO: 3301 - DNA, 25 bp, synthetic construct
  misc_feature 1..25: note = Description of Artificial Sequence: Syntheticoligonucleotide
  misc_feature 1..25: note = Description of Combined DNA/RNA Molecule: Syntheticoligonucleotide
  source 1..25: mol_type = other DNA
  modified_base order(1,10,13,14,15,16,19,23): mod_base = OTHER; note = Uracil
taaaaacaatccttttgataaattt

SEQ ID NO: 3302 - RNA, 25 nt, synthetic construct
  misc_feature 1..25: note = Description of Artificial Sequence: Syntheticoligonucleotide
  source 1..25: mol_type = other RNA
aacaatccttttgataaatttaaaa

SEQ ID NO: 3303 - DNA, 25 bp, synthetic construct
  misc_feature 1..25: note = Description of Artificial Sequence: Syntheticoligonucleotide
  misc_feature 1..25: note = Description of Combined DNA/RNA Molecule: Syntheticoligonucleotide
  source 1..25: mol_type = other DNA
  modified_base order(1,4,5,6,7,10,14,15,16,21,23): mod_base = OTHER; note = Uracil
tccttttgataaatttaaaatgtta

SEQ ID NO: 3304 - RNA, 25 nt, synthetic construct
  misc_feature 1..25: note = Description of Artificial Sequence: Syntheticoligonucleotide
  source 1..25: mol_type = other RNA
ccttttgataaatttaaaatgttac

SEQ ID NO: 3305 - DNA, 25 bp, synthetic construct
  misc_feature 1..25: note = Description of Artificial Sequence: Syntheticoligonucleotide
  misc_feature 1..25: note = Description of Combined DNA/RNA Molecule: Syntheticoligonucleotide
  source 1..25: mol_type = other DNA
  modified_base order(2,3,4,5,8,12,13,14,19,21,22): mod_base = OTHER; note = Uracil
cttttgataaatttaaaatgttact

SEQ ID NO: 3306 - DNA, 25 bp, synthetic construct
  misc_feature 1..25: note = Description of Artificial Sequence: Syntheticoligonucleotide
  misc_feature 1..25: note = Description of Combined DNA/RNA Molecule: Syntheticoligonucleotide
  source 1..25: mol_type = other DNA
  modified_base order(1,4,8,9,10,15,17,18,21,22): mod_base = OTHER; note = Uracil
tgataaatttaaaatgttacttatt

SEQ ID NO: 3307 - DNA, 25 bp, synthetic construct
  misc_feature 1..25: note = Description of Artificial Sequence: Syntheticoligonucleotide
  misc_feature 1..25: note = Description of Combined DNA/RNA Molecule: Syntheticoligonucleotide
  source 1..25: mol_type = other DNA
  modified_base order(3,7,8,9,14,16,17,20,21,23): mod_base = OTHER; note = Uracil
gataaatttaaaatgttacttattt

SEQ ID NO: 3308 - DNA, 25 bp, synthetic construct
  misc_feature 1..25: note = Description of Artificial Sequence: Syntheticoligonucleotide
  misc_feature 1..25: note = Description of Combined DNA/RNA Molecule: Syntheticoligonucleotide
  source 1..25: mol_type = other DNA
  modified_base order(2,6,7,8,13,15,16,19,20,22,23): mod_base = OTHER; note = Uracil
ataaatttaaaatgttacttatttt

SEQ ID NO: 3309 - DNA, 25 bp, synthetic construct
  misc_feature 1..25: note = Description of Artificial Sequence: Syntheticoligonucleotide
  misc_feature 1..25: note = Description of Combined DNA/RNA Molecule: Syntheticoligonucleotide
  source 1..25: mol_type = other DNA
  modified_base order(1,5,6,7,12,14,15,18,19,21,22,23): mod_base = OTHER; note = Uracil
taaatttaaaatgttacttatttta

SEQ ID NO: 3310 - RNA, 25 nt, synthetic construct
  misc_feature 1..25: note = Description of Artificial Sequence: Syntheticoligonucleotide
  source 1..25: mol_type = other RNA
aaatttaaaatgttacttattttaa

SEQ ID NO: 3311 - RNA, 25 nt, synthetic construct
  misc_feature 1..25: note = Description of Artificial Sequence: Syntheticoligonucleotide
  source 1..25: mol_type = other RNA
aatttaaaatgttacttattttaaa

SEQ ID NO: 3312 - DNA, 25 bp, synthetic construct
  misc_feature 1..25: note = Description of Artificial Sequence: Syntheticoligonucleotide
  misc_feature 1..25: note = Description of Combined DNA/RNA Molecule: Syntheticoligonucleotide
  source 1..25: mol_type = other DNA
  modified_base order(1,2,3,8,10,11,14,15,17,18,19,20): mod_base = OTHER; note = Uracil
tttaaaatgttacttattttaaaat

SEQ ID NO: 3313 - DNA, 25 bp, synthetic construct
  misc_feature 1..25: note = Description of Artificial Sequence: Syntheticoligonucleotide
  misc_feature 1..25: note = Description of Combined DNA/RNA Molecule: Syntheticoligonucleotide
  source 1..25: mol_type = other DNA
  modified_base order(1,2,7,9,10,13,14,16,17,18,19): mod_base = OTHER; note = Uracil
ttaaaatgttacttattttaaaata

SEQ ID NO: 3314 - RNA, 25 nt, synthetic construct
  misc_feature 1..25: note = Description of Artificial Sequence: Syntheticoligonucleotide
  source 1..25: mol_type = other RNA
taaaatgttacttattttaaaataa

SEQ ID NO: 3315 - RNA, 25 nt, synthetic construct
  misc_feature 1..25: note = Description of Artificial Sequence: Syntheticoligonucleotide
  source 1..25: mol_type = other RNA
aaaatgttacttattttaaaataaa

SEQ ID NO: 3316 - DNA, 25 bp, synthetic construct
  misc_feature 1..25: note = Description of Artificial Sequence: Syntheticoligonucleotide
  misc_feature 1..25: note = Description of Combined DNA/RNA Molecule: Syntheticoligonucleotide
  source 1..25: mol_type = other DNA
  modified_base order(4,6,7,10,11,13,14,15,16,21): mod_base = OTHER; note = Uracil
aaatgttacttattttaaaataaat

SEQ ID NO: 3317 - RNA, 25 nt, synthetic construct
  misc_feature 1..25: note = Description of Artificial Sequence: Syntheticoligonucleotide
  source 1..25: mol_type = other RNA
atgttacttattttaaaataaatga

SEQ ID NO: 3318 - RNA, 25 nt, synthetic construct
  misc_feature 1..25: note = Description of Artificial Sequence: Syntheticoligonucleotide
  source 1..25: mol_type = other RNA
acttattttaaaataaatgaagtga

SEQ ID NO: 3319 - RNA, 25 nt, synthetic construct
  misc_feature 1..25: note = Description of Artificial Sequence: Syntheticoligonucleotide
  source 1..25: mol_type = other RNA
ttattttaaaataaatgaagtgaga

SEQ ID NO: 3320 - DNA, 25 bp, synthetic construct
  misc_feature 1..25: note = Description of Artificial Sequence: Syntheticoligonucleotide
  misc_feature 1..25: note = Description of Combined DNA/RNA Molecule: Syntheticoligonucleotide
  source 1..25: mol_type = other DNA
  modified_base order(1,3,4,5,6,11,15,20): mod_base = OTHER; note = Uracil
tattttaaaataaatgaagtgagat

SEQ ID NO: 3321 - RNA, 25 nt, synthetic construct
  misc_feature 1..25: note = Description of Artificial Sequence: Syntheticoligonucleotide
  source 1..25: mol_type = other RNA
tttaaaataaatgaagtgagatggc

SEQ ID NO: 3322 - RNA, 25 nt, synthetic construct
  misc_feature 1..25: note = Description of Artificial Sequence: Syntheticoligonucleotide
  source 1..25: mol_type = other RNA
ttaaaataaatgaagtgagatggca

SEQ ID NO: 3323 - DNA, 25 bp, synthetic construct
  misc_feature 1..25: note = Description of Artificial Sequence: Syntheticoligonucleotide
  misc_feature 1..25: note = Description of Combined DNA/RNA Molecule: Syntheticoligonucleotide
  source 1..25: mol_type = other DNA
  modified_base order(1,5,6,7,9,10,13,15,16): mod_base = OTHER; note = Uracil
tccatttcttcatgttaaaagaagt

SEQ ID NO: 3324 - DNA, 25 bp, synthetic construct
  misc_feature 1..25: note = Description of Artificial Sequence: Syntheticoligonucleotide
  misc_feature 1..25: note = Description of Combined DNA/RNA Molecule: Syntheticoligonucleotide
  source 1..25: mol_type = other DNA
  modified_base order(4,5,6,8,9,12,14,15): mod_base = OTHER; note = Uracil
ccatttcttcatgttaaaagaagtc

SEQ ID NO: 3325 - DNA, 25 bp, synthetic construct
  misc_feature 1..25: note = Description of Artificial Sequence: Syntheticoligonucleotide
  misc_feature 1..25: note = Description of Combined DNA/RNA Molecule: Syntheticoligonucleotide
  source 1..25: mol_type = other DNA
  modified_base order(2,8,10,11,14,15,16,17,18,19,20,21,22,23): mod_base = OTHER; note = Uracil
ctcaaactcttagtttttttttttt

SEQ ID NO: 3326 - DNA, 25 bp, synthetic construct
  misc_feature 1..25: note = Description of Artificial Sequence: Syntheticoligonucleotide
  misc_feature 1..25: note = Description of Combined DNA/RNA Molecule: Syntheticoligonucleotide
  source 1..25: mol_type = other DNA
  modified_base order(1,4,5,6,7,8,9,10,11,12,13,14,15,21,23): mod_base = OTHER; note = Uracil
tagttttttttttttacaactatgt

SEQ ID NO: 3327 - DNA, 25 bp, synthetic construct
  misc_feature 1..25: note = Description of Artificial Sequence: Syntheticoligonucleotide
  misc_feature 1..25: note = Description of Combined DNA/RNA Molecule: Syntheticoligonucleotide
  source 1..25: mol_type = other DNA
  modified_base order(3,4,5,6,7,8,9,10,11,12,13,14,20,22): mod_base = OTHER; note = Uracil
agttttttttttttacaactatgta

SEQ ID NO: 3328 - RNA, 25 nt, synthetic construct
  misc_feature 1..25: note = Description of Artificial Sequence: Syntheticoligonucleotide
  source 1..25: mol_type = other RNA
gttttttttttttacaactatgtaa

SEQ ID NO: 3329 - DNA, 25 bp, synthetic construct
  misc_feature 1..25: note = Description of Artificial Sequence: Syntheticoligonucleotide
  misc_feature 1..25: note = Description of Combined DNA/RNA Molecule: Syntheticoligonucleotide
  source 1..25: mol_type = other DNA
  modified_base order(1,2,3,4,5,6,7,8,9,10,11,12,18,20,22): mod_base = OTHER; note = Uracil
ttttttttttttacaactatgtaat

SEQ ID NO: 3330 - DNA, 25 bp, synthetic construct
  misc_feature 1..25: note = Description of Artificial Sequence: Syntheticoligonucleotide
  misc_feature 1..25: note = Description of Combined DNA/RNA Molecule: Syntheticoligonucleotide
  source 1..25: mol_type = other DNA
  modified_base order(1,2,3,4,5,6,7,8,9,10,11,17,19,21): mod_base = OTHER; note = Uracil
tttttttttttacaactatgtaatt

SEQ ID NO: 3331 - DNA, 25 bp, synthetic construct
  misc_feature 1..25: note = Description of Artificial Sequence: Syntheticoligonucleotide
  misc_feature 1..25: note = Description of Combined DNA/RNA Molecule: Syntheticoligonucleotide
  source 1..25: mol_type = other DNA
  modified_base order(1,2,3,4,5,6,7,8,9,10,16,18,20,23): mod_base = OTHER; note = Uracil
ttttttttttacaactatgtaattt

SEQ ID NO: 3332 - DNA, 25 bp, synthetic construct
  misc_feature 1..25: note = Description of Artificial Sequence: Syntheticoligonucleotide
  misc_feature 1..25: note = Description of Combined DNA/RNA Molecule: Syntheticoligonucleotide
  source 1..25: mol_type = other DNA
  modified_base order(1,2,3,4,5,6,7,8,9,15,17,19,22,23): mod_base = OTHER; note = Uracil
tttttttttacaactatgtaattta

SEQ ID NO: 3333 - DNA, 25 bp, synthetic construct
  misc_feature 1..25: note = Description of Artificial Sequence: Syntheticoligonucleotide
  misc_feature 1..25: note = Description of Combined DNA/RNA Molecule: Syntheticoligonucleotide
  source 1..25: mol_type = other DNA
  modified_base order(1,2,3,4,5,6,7,8,14,16,18,21,22,23): mod_base = OTHER; note = Uracil
ttttttttacaactatgtaatttat

SEQ ID NO: 3334 - DNA, 25 bp, synthetic construct
  misc_feature 1..25: note = Description of Artificial Sequence: Syntheticoligonucleotide
  misc_feature 1..25: note = Description of Combined DNA/RNA Molecule: Syntheticoligonucleotide
  source 1..25: mol_type = other DNA
  modified_base order(1,2,3,4,5,6,7,13,15,17,20,21,22): mod_base = OTHER; note = Uracil
tttttttacaactatgtaatttata

SEQ ID NO: 3335 - DNA, 25 bp, synthetic construct
  misc_feature 1..25: note = Description of Artificial Sequence: Syntheticoligonucleotide
  misc_feature 1..25: note = Description of Combined DNA/RNA Molecule: Syntheticoligonucleotide
  source 1..25: mol_type = other DNA
  modified_base order(1,2,3,4,5,6,12,14,16,19,20,21,23): mod_base = OTHER; note = Uracil
ttttttacaactatgtaatttatat

SEQ ID NO: 3336 - DNA, 25 bp, synthetic construct
  misc_feature 1..25: note = Description of Artificial Sequence: Syntheticoligonucleotide
  misc_feature 1..25: note = Description of Combined DNA/RNA Molecule: Syntheticoligonucleotide
  source 1..25: mol_type = other DNA
  modified_base order(1,2,3,4,5,11,13,15,18,19,20,22): mod_base = OTHER; note = Uracil
tttttacaactatgtaatttatatt

SEQ ID NO: 3337 - DNA, 25 bp, synthetic construct
  misc_feature 1..25: note = Description of Artificial Sequence: Syntheticoligonucleotide
  misc_feature 1..25: note = Description of Combined DNA/RNA Molecule: Syntheticoligonucleotide
  source 1..25: mol_type = other DNA
  modified_base order(4,6,8,11,12,13,15,17,18,22,23): mod_base = OTHER; note = Uracil
aactatgtaatttatattccattta

SEQ ID NO: 3338 - RNA, 25 nt, synthetic construct
  misc_feature 1..25: note = Description of Artificial Sequence: Syntheticoligonucleotide
  source 1..25: mol_type = other RNA
actatgtaatttatattccatttac

SEQ ID NO: 3339 - RNA, 25 nt, synthetic construct
  misc_feature 1..25: note = Description of Artificial Sequence: Syntheticoligonucleotide
  source 1..25: mol_type = other RNA
ctatgtaatttatattccatttaca

SEQ ID NO: 3340 - RNA, 25 nt, synthetic construct
  misc_feature 1..25: note = Description of Artificial Sequence: Syntheticoligonucleotide
  source 1..25: mol_type = other RNA
aatttatattccatttacataagga

SEQ ID NO: 3341 - DNA, 25 bp, synthetic construct
  misc_feature 1..25: note = Description of Artificial Sequence: Syntheticoligonucleotide
  misc_feature 1..25: note = Description of Combined DNA/RNA Molecule: Syntheticoligonucleotide
  source 1..25: mol_type = other DNA
  modified_base order(2,3,4,6,8,9,13,14,15,19): mod_base = OTHER; note = Uracil
atttatattccatttacataaggat

SEQ ID NO: 3342 - DNA, 25 bp, synthetic construct
  misc_feature 1..25: note = Description of Artificial Sequence: Syntheticoligonucleotide
  misc_feature 1..25: note = Description of Combined DNA/RNA Molecule: Syntheticoligonucleotide
  source 1..25: mol_type = other DNA
  modified_base order(1,2,3,5,7,8,12,13,14,18): mod_base = OTHER; note = Uracil
tttatattccatttacataaggata

SEQ ID NO: 3343 - RNA, 25 nt, synthetic construct
  misc_feature 1..25: note = Description of Artificial Sequence: Syntheticoligonucleotide
  source 1..25: mol_type = other RNA
ttatattccatttacataaggatac

SEQ ID NO: 3344 - RNA, 25 nt, synthetic construct
  misc_feature 1..25: note = Description of Artificial Sequence: Syntheticoligonucleotide
  source 1..25: mol_type = other RNA
tacataaggatacacttatttgtca

SEQ ID NO: 3345 - DNA, 25 bp, synthetic construct
  misc_feature 1..25: note = Description of Artificial Sequence: Syntheticoligonucleotide
  misc_feature 1..25: note = Description of Combined DNA/RNA Molecule: Syntheticoligonucleotide
  source 1..25: mol_type = other DNA
  modified_base order(1,7,12,13,15,16,17,19): mod_base = OTHER; note = Uracil
taaggatacacttatttgtcaagct

SEQ ID NO: 3346 - DNA, 25 bp, synthetic construct
  misc_feature 1..25: note = Description of Artificial Sequence: Syntheticoligonucleotide
  misc_feature 1..25: note = Description of Combined DNA/RNA Molecule: Syntheticoligonucleotide
  source 1..25: mol_type = other DNA
  modified_base order(2,4,6,10,11,12,13,14,19,21,23): mod_base = OTHER; note = Uracil
atctgtaaatttttaacctatgtta

SEQ ID NO: 3347 - RNA, 25 nt, synthetic construct
  misc_feature 1..25: note = Description of Artificial Sequence: Syntheticoligonucleotide
  source 1..25: mol_type = other RNA
tctgtaaatttttaacctatgttac

SEQ ID NO: 3348 - RNA, 25 nt, synthetic construct
  misc_feature 1..25: note = Description of Artificial Sequence: Syntheticoligonucleotide
  source 1..25: mol_type = other RNA
ctgtaaatttttaacctatgttaca

SEQ ID NO: 3349 - RNA, 25 nt, synthetic construct
  misc_feature 1..25: note = Description of Artificial Sequence: Syntheticoligonucleotide
  source 1..25: mol_type = other RNA
tgcaagaggtgaagtttatatttga

SEQ ID NO: 3350 - DNA, 25 bp, synthetic construct
  misc_feature 1..25: note = Description of Artificial Sequence: Syntheticoligonucleotide
  misc_feature 1..25: note = Description of Combined DNA/RNA Molecule: Syntheticoligonucleotide
  source 1..25: mol_type = other DNA
  modified_base order(8,13,14,15,17,19,20,21): mod_base = OTHER; note = Uracil
caagaggtgaagtttatatttgaat

SEQ ID NO: 3351 - DNA, 25 bp, synthetic construct
  misc_feature 1..25: note = Description of Artificial Sequence: Syntheticoligonucleotide
  misc_feature 1..25: note = Description of Combined DNA/RNA Molecule: Syntheticoligonucleotide
  source 1..25: mol_type = other DNA
  modified_base order(7,12,13,14,16,18,19,20): mod_base = OTHER; note = Uracil
aagaggtgaagtttatatttgaata

SEQ ID NO: 3352 - DNA, 25 bp, synthetic construct
  misc_feature 1..25: note = Description of Artificial Sequence: Syntheticoligonucleotide
  misc_feature 1..25: note = Description of Combined DNA/RNA Molecule: Syntheticoligonucleotide
  source 1..25: mol_type = other DNA
  modified_base order(5,10,11,12,14,16,17,18,22): mod_base = OTHER; note = Uracil
gaggtgaagtttatatttgaatatc

SEQ ID NO: 3353 - RNA, 25 nt, synthetic construct
  misc_feature 1..25: note = Description of Artificial Sequence: Syntheticoligonucleotide
  source 1..25: mol_type = other RNA
aggtgaagtttatatttgaatatcc

SEQ ID NO: 3354 - DNA, 25 bp, synthetic construct
  misc_feature 1..25: note = Description of Artificial Sequence: Syntheticoligonucleotide
  misc_feature 1..25: note = Description of Combined DNA/RNA Molecule: Syntheticoligonucleotide
  source 1..25: mol_type = other DNA
  modified_base order(4,5,6,8,10,11,12,16,18,22,23): mod_base = OTHER; note = Uracil
aagtttatatttgaatatccattct

SEQ ID NO: 3355 - DNA, 25 bp, synthetic construct
  misc_feature 1..25: note = Description of Artificial Sequence: Syntheticoligonucleotide
  misc_feature 1..25: note = Description of Combined DNA/RNA Molecule: Syntheticoligonucleotide
  source 1..25: mol_type = other DNA
  modified_base order(3,4,7,12,13,14,15,18,21,22): mod_base = OTHER; note = Uracil
acttgatgcagttttaatacttgta

SEQ ID NO: 3356 - DNA, 25 bp, synthetic construct
  misc_feature 1..25: note = Description of Artificial Sequence: Syntheticoligonucleotide
  misc_feature 1..25: note = Description of Combined DNA/RNA Molecule: Syntheticoligonucleotide
  source 1..25: mol_type = other DNA
  modified_base order(1,2,5,10,11,12,13,16,19,20,22): mod_base = OTHER; note = Uracil
ttgatgcagttttaatacttgtaat

SEQ ID NO: 3357 - RNA, 25 nt, synthetic construct
  misc_feature 1..25: note = Description of Artificial Sequence: Syntheticoligonucleotide
  source 1..25: mol_type = other RNA
gatttgacctaatcactaattttca

SEQ ID NO: 3358 - DNA, 25 bp, synthetic construct
  misc_feature 1..25: note = Description of Artificial Sequence: Syntheticoligonucleotide
  misc_feature 1..25: note = Description of Combined DNA/RNA Molecule: Syntheticoligonucleotide
  source 1..25: mol_type = other DNA
  modified_base order(4,7,11,14,15,16,17,22): mod_base = OTHER; note = Uracil
acctaatcactaattttcaggtggt

SEQ ID NO: 3359 - DNA, 25 bp, synthetic construct
  misc_feature 1..25: note = Description of Artificial Sequence: Syntheticoligonucleotide
  misc_feature 1..25: note = Description of Combined DNA/RNA Molecule: Syntheticoligonucleotide
  source 1..25: mol_type = other DNA
  modified_base order(4,9,10,11,12,13,20,23): mod_base = OTHER; note = Uracil
cagtaggatttttcaaacctggtat

SEQ ID NO: 3360 - DNA, 25 bp, synthetic construct
  misc_feature 1..25: note = Description of Artificial Sequence: Syntheticoligonucleotide
  misc_feature 1..25: note = Description of Combined DNA/RNA Molecule: Syntheticoligonucleotide
  source 1..25: mol_type = other DNA
  modified_base order(3,14,15,16,19): mod_base = OTHER; note = Uracil
agtggaaggagaatttaataaagat

SEQ ID NO: 3361 - DNA, 25 bp, synthetic construct
  misc_feature 1..25: note = Description of Artificial Sequence: Syntheticoligonucleotide
  misc_feature 1..25: note = Description of Combined DNA/RNA Molecule: Syntheticoligonucleotide
  source 1..25: mol_type = other DNA
  modified_base order(11,12,13,16,22): mod_base = OTHER; note = Uracil
ggaaggagaatttaataaagatagt

SEQ ID NO: 3362 - RNA, 25 nt, synthetic construct
  misc_feature 1..25: note = Description of Artificial Sequence: Syntheticoligonucleotide
  source 1..25: mol_type = other RNA
aaggagaatttaataaagatagtgc

SEQ ID NO: 3363 - DNA, 25 bp, synthetic construct
  misc_feature 1..25: note = Description of Artificial Sequence: Syntheticoligonucleotide
  misc_feature 1..25: note = Description of Combined DNA/RNA Molecule: Syntheticoligonucleotide
  source 1..25: mol_type = other DNA
  modified_base order(8,9,10,13,19,22): mod_base = OTHER; note = Uracil
aggagaatttaataaagatagtgct

SEQ ID NO: 3364 - RNA, 25 nt, synthetic construct
  misc_feature 1..25: note = Description of Artificial Sequence: Syntheticoligonucleotide
  source 1..25: mol_type = other RNA
gaatttaataaagatagtgctgaaa

SEQ ID NO: 3365 - RNA, 25 nt, synthetic construct
  misc_feature 1..25: note = Description of Artificial Sequence: Syntheticoligonucleotide
  source 1..25: mol_type = other RNA
tccttaggtaatctataactaggac

SEQ ID NO: 3366 - DNA, 25 bp, synthetic construct
  misc_feature 1..25: note = Description of Artificial Sequence: Syntheticoligonucleotide
  misc_feature 1..25: note = Description of Combined DNA/RNA Molecule: Syntheticoligonucleotide
  source 1..25: mol_type = other DNA
  modified_base order(3,4,8,11,13,15,19): mod_base = OTHER; note = Uracil
ccttaggtaatctataactaggact

SEQ ID NO: 3367 - DNA, 25 bp, synthetic construct
  misc_feature 1..25: note = Description of Artificial Sequence: Syntheticoligonucleotide
  misc_feature 1..25: note = Description of Combined DNA/RNA Molecule: Syntheticoligonucleotide
  source 1..25: mol_type = other DNA
  modified_base order(6,9,13,14,18,19,21,22,23): mod_base = OTHER; note = Uracil
aacagtaatacattccattgtttta

SEQ ID NO: 3368 - DNA, 25 bp, synthetic construct
  misc_feature 1..25: note = Description of Artificial Sequence: Syntheticoligonucleotide
  misc_feature 1..25: note = Description of Combined DNA/RNA Molecule: Syntheticoligonucleotide
  source 1..25: mol_type = other DNA
  modified_base order(4,7,11,12,16,17,19,20,21,22): mod_base = OTHER; note = Uracil
cagtaatacattccattgttttagt

SEQ ID NO: 3369 - DNA, 25 bp, synthetic construct
  misc_feature 1..25: note = Description of Artificial Sequence: Syntheticoligonucleotide
  misc_feature 1..25: note = Description of Combined DNA/RNA Molecule: Syntheticoligonucleotide
  source 1..25: mol_type = other DNA
  modified_base order(3,6,10,11,15,16,18,19,20,21): mod_base = OTHER; note = Uracil
agtaatacattccattgttttagta

SEQ ID NO: 3370 - RNA, 25 nt, synthetic construct
  misc_feature 1..25: note = Description of Artificial Sequence: Syntheticoligonucleotide
  source 1..25: mol_type = other RNA
gtaatacattccattgttttagtaa

SEQ ID NO: 3371 - DNA, 25 bp, synthetic construct
  misc_feature 1..25: note = Description of Artificial Sequence: Syntheticoligonucleotide
  misc_feature 1..25: note = Description of Combined DNA/RNA Molecule: Syntheticoligonucleotide
  source 1..25: mol_type = other DNA
  modified_base order(4,5,7,8,9,10,13,23): mod_base = OTHER; note = Uracil
ccattgttttagtaaccagaaatct

SEQ ID NO: 3372 - RNA, 25 nt, synthetic construct
  misc_feature 1..25: note = Description of Artificial Sequence: Syntheticoligonucleotide
  source 1..25: mol_type = other RNA
accagaaatcttcatgcaatgaaaa

SEQ ID NO: 3373 - DNA, 25 bp, synthetic construct
  misc_feature 1..25: note = Description of Artificial Sequence: Syntheticoligonucleotide
  misc_feature 1..25: note = Description of Combined DNA/RNA Molecule: Syntheticoligonucleotide
  source 1..25: mol_type = other DNA
  modified_base order(1,2,5,10,17,20,21,22): mod_base = OTHER; note = Uracil
ttcatgcaatgaaaaatactttaat

SEQ ID NO: 3374 - RNA, 25 nt, synthetic construct
  misc_feature 1..25: note = Description of Artificial Sequence: Syntheticoligonucleotide
  source 1..25: mol_type = other RNA
aatgaaaaatactttaattcatgaa

SEQ ID NO: 3375 - RNA, 25 nt, synthetic construct
  misc_feature 1..25: note = Description of Artificial Sequence: Syntheticoligonucleotide
  source 1..25: mol_type = other RNA
tgaaaaatactttaattcatgaagc

SEQ ID NO: 3376 - DNA, 25 bp, synthetic construct
  misc_feature 1..25: note = Description of Artificial Sequence: Syntheticoligonucleotide
  misc_feature 1..25: note = Description of Combined DNA/RNA Molecule: Syntheticoligonucleotide
  source 1..25: mol_type = other DNA
  modified_base order(7,10,11,12,15,16,19): mod_base = OTHER; note = Uracil
gaaaaatactttaattcatgaagct

SEQ ID NO: 3377 - DNA, 25 bp, synthetic construct
  misc_feature 1..25: note = Description of Artificial Sequence: Syntheticoligonucleotide
  misc_feature 1..25: note = Description of Combined DNA/RNA Molecule: Syntheticoligonucleotide
  source 1..25: mol_type = other DNA
  modified_base order(1,2,5,11,12,15,16,17,18,19,20,21,22,23): mod_base = OTHER; note = Uracil
ttcatgaagcttacttttttttttt

SEQ ID NO: 3378 - DNA, 25 bp, synthetic construct
  misc_feature 1..25: note = Description of Artificial Sequence: Syntheticoligonucleotide
  misc_feature 1..25: note = Description of Combined DNA/RNA Molecule: Syntheticoligonucleotide
  source 1..25: mol_type = other DNA
  modified_base order(2,8,9,12,13,14,15,16,17,18,19,20,21,22): mod_base = OTHER; note = Uracil
atgaagcttactttttttttttggt

SEQ ID NO: 3379 - RNA, 25 nt, synthetic construct
  misc_feature 1..25: note = Description of Artificial Sequence: Syntheticoligonucleotide
  source 1..25: mol_type = other RNA
agcttactttttttttttggtgtca

SEQ ID NO: 3380 - DNA, 25 bp, synthetic construct
  misc_feature 1..25: note = Description of Artificial Sequence: Syntheticoligonucleotide
  misc_feature 1..25: note = Description of Combined DNA/RNA Molecule: Syntheticoligonucleotide
  source 1..25: mol_type = other DNA
  modified_base order(1,4,5,6,7,8,9,10,11,12,13,14,17,19): mod_base = OTHER; note = Uracil
tactttttttttttggtgtcagagt

SEQ ID NO: 3381 - DNA, 25 bp, synthetic construct
  misc_feature 1..25: note = Description of Artificial Sequence: Syntheticoligonucleotide
  misc_feature 1..25: note = Description of Combined DNA/RNA Molecule: Syntheticoligonucleotide
  source 1..25: mol_type = other DNA
  modified_base order(3,4,5,6,7,8,9,10,11,12,13,16,18): mod_base = OTHER; note = Uracil
actttttttttttggtgtcagagtc

SEQ ID NO: 3382 - RNA, 25 nt, synthetic construct
  misc_feature 1..25: note = Description of Artificial Sequence: Syntheticoligonucleotide
  source 1..25: mol_type = other RNA
aactaatttttgtatttttaggaga

SEQ ID NO: 3383 - RNA, 25 nt, synthetic construct
  misc_feature 1..25: note = Description of Artificial Sequence: Syntheticoligonucleotide
  source 1..25: mol_type = other RNA
taatttttgtatttttaggagagac

SEQ ID NO: 3384 - DNA, 25 bp, synthetic construct
  misc_feature 1..25: note = Description of Artificial Sequence: Syntheticoligonucleotide
  misc_feature 1..25: note = Description of Combined DNA/RNA Molecule: Syntheticoligonucleotide
  source 1..25: mol_type = other DNA
  modified_base order(2,5,6,7,9,10,18,20,21,22): mod_base = OTHER; note = Uracil
ctcatttattcagcaaatatttatt

SEQ ID NO: 3385 - RNA, 25 nt, synthetic construct
  misc_feature 1..25: note = Description of Artificial Sequence: Syntheticoligonucleotide
  source 1..25: mol_type = other RNA
catttattcagcaaatatttattga

SEQ ID NO: 3386 - DNA, 25 bp, synthetic construct
  misc_feature 1..25: note = Description of Artificial Sequence: Syntheticoligonucleotide
  misc_feature 1..25: note = Description of Combined DNA/RNA Molecule: Syntheticoligonucleotide
  source 1..25: mol_type = other DNA
  modified_base order(1,2,3,5,6,14,16,17,18,20,21): mod_base = OTHER; note = Uracil
tttattcagcaaatatttattgagt

SEQ ID NO: 3387 - DNA, 25 bp, synthetic construct
  misc_feature 1..25: note = Description of Artificial Sequence: Syntheticoligonucleotide
  misc_feature 1..25: note = Description of Combined DNA/RNA Molecule: Syntheticoligonucleotide
  source 1..25: mol_type = other DNA
  modified_base order(1,3,4,5,6,9,10,11,12): mod_base = OTHER; note = Uracil
tattttagttttgcaaagaaggggt

SEQ ID NO: 3388 - DNA, 25 bp, synthetic construct
  misc_feature 1..25: note = Description of Artificial Sequence: Syntheticoligonucleotide
  misc_feature 1..25: note = Description of Combined DNA/RNA Molecule: Syntheticoligonucleotide
  source 1..25: mol_type = other DNA
  modified_base order(2,4,6,9,10,12,13,14,15,18,23): mod_base = OTHER; note = Uracil
ctctataattgttttgctacgattc

SEQ ID NO: 3389 - DNA, 25 bp, synthetic construct
  misc_feature 1..25: note = Description of Artificial Sequence: Syntheticoligonucleotide
  misc_feature 1..25: note = Description of Combined DNA/RNA Molecule: Syntheticoligonucleotide
  source 1..25: mol_type = other DNA
  modified_base order(1,4,5,6,8,10,14,18,19,22,23): mod_base = OTHER; note = Uracil
tactttatgtaaatcacttcattgt

SEQ ID NO: 3390 - DNA, 25 bp, synthetic construct
  misc_feature 1..25: note = Description of Artificial Sequence: Syntheticoligonucleotide
  misc_feature 1..25: note = Description of Combined DNA/RNA Molecule: Syntheticoligonucleotide
  source 1..25: mol_type = other DNA
  modified_base order(3,4,5,7,9,13,17,18,21,22): mod_base = OTHER; note = Uracil
actttatgtaaatcacttcattgtt

SEQ ID NO: 3391 - DNA, 25 bp, synthetic construct
  misc_feature 1..25: note = Description of Artificial Sequence: Syntheticoligonucleotide
  misc_feature 1..25: note = Description of Combined DNA/RNA Molecule: Syntheticoligonucleotide
  source 1..25: mol_type = other DNA
  modified_base order(2,3,4,6,8,12,16,17,20,21,23): mod_base = OTHER; note = Uracil
ctttatgtaaatcacttcattgttt

SEQ ID NO: 3392 - DNA, 25 bp, synthetic construct
  misc_feature 1..25: note = Description of Artificial Sequence: Syntheticoligonucleotide
  misc_feature 1..25: note = Description of Combined DNA/RNA Molecule: Syntheticoligonucleotide
  source 1..25: mol_type = other DNA
  modified_base order(1,2,3,5,7,11,15,16,19,20,22,23): mod_base = OTHER; note = Uracil
tttatgtaaatcacttcattgtttt

SEQ ID NO: 3393 - DNA, 25 bp, synthetic construct
  misc_feature 1..25: note = Description of Artificial Sequence: Syntheticoligonucleotide
  misc_feature 1..25: note = Description of Combined DNA/RNA Molecule: Syntheticoligonucleotide
  source 1..25: mol_type = other DNA
  modified_base order(1,2,4,6,10,14,15,18,19,21,22,23): mod_base = OTHER; note = Uracil
ttatgtaaatcacttcattgtttta

SEQ ID NO: 3394 - RNA, 25 nt, synthetic construct
  misc_feature 1..25: note = Description of Artificial Sequence: Syntheticoligonucleotide
  source 1..25: mol_type = other RNA
tatgtaaatcacttcattgttttaa

SEQ ID NO: 3395 - RNA, 25 nt, synthetic construct
  misc_feature 1..25: note = Description of Artificial Sequence: Syntheticoligonucleotide
  source 1..25: mol_type = other RNA
atgtaaatcacttcattgttttaaa

SEQ ID NO: 3396 - DNA, 25 bp, synthetic construct
  misc_feature 1..25: note = Description of Artificial Sequence: Syntheticoligonucleotide
  misc_feature 1..25: note = Description of Combined DNA/RNA Molecule: Syntheticoligonucleotide
  source 1..25: mol_type = other DNA
  modified_base order(2,3,5,6,7,8,16,21,22): mod_base = OTHER; note = Uracil
attgttttaaaggaataaacttgat

SEQ ID NO: 3397 - DNA, 25 bp, synthetic construct
  misc_feature 1..25: note = Description of Artificial Sequence: Syntheticoligonucleotide
  misc_feature 1..25: note = Description of Combined DNA/RNA Molecule: Syntheticoligonucleotide
  source 1..25: mol_type = other DNA
  modified_base order(1,2,4,5,6,7,15,20,21): mod_base = OTHER; note = Uracil
ttgttttaaaggaataaacttgatt

SEQ ID NO: 3398 - DNA, 25 bp, synthetic construct
  misc_feature 1..25: note = Description of Artificial Sequence: Syntheticoligonucleotide
  misc_feature 1..25: note = Description of Combined DNA/RNA Molecule: Syntheticoligonucleotide
  source 1..25: mol_type = other DNA
  modified_base order(1,2,3,4,12,17,18,21,22): mod_base = OTHER; note = Uracil
ttttaaaggaataaacttgattata

SEQ ID NO: 3399 - DNA, 25 bp, synthetic construct
  misc_feature 1..25: note = Description of Artificial Sequence: Syntheticoligonucleotide
  misc_feature 1..25: note = Description of Combined DNA/RNA Molecule: Syntheticoligonucleotide
  source 1..25: mol_type = other DNA
  modified_base order(1,2,3,11,16,17,20,21,23): mod_base = OTHER; note = Uracil
tttaaaggaataaacttgattatat

SEQ ID NO: 3400 - DNA, 25 bp, synthetic construct
  misc_feature 1..25: note = Description of Artificial Sequence: Syntheticoligonucleotide
  misc_feature 1..25: note = Description of Combined DNA/RNA Molecule: Syntheticoligonucleotide
  source 1..25: mol_type = other DNA
  modified_base order(1,2,10,15,16,19,20,22): mod_base = OTHER; note = Uracil
ttaaaggaataaacttgattatatt

SEQ ID NO: 3401 - DNA, 25 bp, synthetic construct
  misc_feature 1..25: note = Description of Artificial Sequence: Syntheticoligonucleotide
  misc_feature 1..25: note = Description of Combined DNA/RNA Molecule: Syntheticoligonucleotide
  source 1..25: mol_type = other DNA
  modified_base order(8,13,14,17,18,20,22,23): mod_base = OTHER; note = Uracil
aaaggaataaacttgattatattgt

SEQ ID NO: 3402 - DNA, 25 bp, synthetic construct
  misc_feature 1..25: note = Description of Artificial Sequence: Syntheticoligonucleotide
  misc_feature 1..25: note = Description of Combined DNA/RNA Molecule: Syntheticoligonucleotide
  source 1..25: mol_type = other DNA
  modified_base order(7,12,13,16,17,19,21,22): mod_base = OTHER; note = Uracil
aaggaataaacttgattatattgtt

SEQ ID NO: 3403 - DNA, 25 bp, synthetic construct
  misc_feature 1..25: note = Description of Artificial Sequence: Syntheticoligonucleotide
  misc_feature 1..25: note = Description of Combined DNA/RNA Molecule: Syntheticoligonucleotide
  source 1..25: mol_type = other DNA
  modified_base order(6,11,12,15,16,18,20,21,23): mod_base = OTHER; note = Uracil
aggaataaacttgattatattgttt

SEQ ID NO: 3404 - DNA, 25 bp, synthetic construct
  misc_feature 1..25: note = Description of Artificial Sequence: Syntheticoligonucleotide
  misc_feature 1..25: note = Description of Combined DNA/RNA Molecule: Syntheticoligonucleotide
  source 1..25: mol_type = other DNA
  modified_base order(5,10,11,14,15,17,19,20,22,23): mod_base = OTHER; note = Uracil
ggaataaacttgattatattgtttt

SEQ ID NO: 3405 - DNA, 25 bp, synthetic construct
  misc_feature 1..25: note = Description of Artificial Sequence: Syntheticoligonucleotide
  misc_feature 1..25: note = Description of Combined DNA/RNA Molecule: Syntheticoligonucleotide
  source 1..25: mol_type = other DNA
  modified_base order(4,9,10,13,14,16,18,19,21,22,23): mod_base = OTHER; note = Uracil
gaataaacttgattatattgttttt

SEQ ID NO: 3406 - DNA, 25 bp, synthetic construct
  misc_feature 1..25: note = Description of Artificial Sequence: Syntheticoligonucleotide
  misc_feature 1..25: note = Description of Combined DNA/RNA Molecule: Syntheticoligonucleotide
  source 1..25: mol_type = other DNA
  modified_base order(4,5,8,9,11,13,14,16,17,18,19,20,21,22): mod_base = OTHER; note = Uracil
aacttgattatattgtttttttatt

SEQ ID NO: 3407 - DNA, 25 bp, synthetic construct
  misc_feature 1..25: note = Description of Artificial Sequence: Syntheticoligonucleotide
  misc_feature 1..25: note = Description of Combined DNA/RNA Molecule: Syntheticoligonucleotide
  source 1..25: mol_type = other DNA
  modified_base order(3,4,7,8,10,12,13,15,16,17,18,19,20,21,23): mod_base = OTHER; note = Uracil
acttgattatattgtttttttattt

SEQ ID NO: 3408 - RNA, 25 nt, synthetic construct
  misc_feature 1..25: note = Description of Artificial Sequence: Syntheticoligonucleotide
  source 1..25: mol_type = other RNA
tgattatattgtttttttatttggc

SEQ ID NO: 3409 - RNA, 25 nt, synthetic construct
  misc_feature 1..25: note = Description of Artificial Sequence: Syntheticoligonucleotide
  source 1..25: mol_type = other RNA
atattgtttttttatttggcataac

SEQ ID NO: 3410 - DNA, 25 bp, synthetic construct
  misc_feature 1..25: note = Description of Artificial Sequence: Syntheticoligonucleotide
  misc_feature 1..25: note = Description of Combined DNA/RNA Molecule: Syntheticoligonucleotide
  source 1..25: mol_type = other DNA
  modified_base order(1,3,4,6,7,8,9,10,11,12,14,15,16,21): mod_base = OTHER; note = Uracil
tattgtttttttatttggcataact

SEQ ID NO: 3411 - RNA, 25 nt, synthetic construct
  misc_feature 1..25: note = Description of Artificial Sequence: Syntheticoligonucleotide
  source 1..25: mol_type = other RNA
gtttttttatttggcataactgtga

SEQ ID NO: 3412 - DNA, 25 bp, synthetic construct
  misc_feature 1..25: note = Description of Artificial Sequence: Syntheticoligonucleotide
  misc_feature 1..25: note = Description of Combined DNA/RNA Molecule: Syntheticoligonucleotide
  source 1..25: mol_type = other DNA
  modified_base order(1,2,3,4,5,6,7,9,10,11,16,20,22): mod_base = OTHER; note = Uracil
tttttttatttggcataactgtgat

SEQ ID NO: 3413 - RNA, 25 nt, synthetic construct
  misc_feature 1..25: note = Description of Artificial Sequence: Syntheticoligonucleotide
  source 1..25: mol_type = other RNA
gcataactgtgattcttttaggaca

SEQ ID NO: 3414 - RNA, 25 nt, synthetic construct
  misc_feature 1..25: note = Description of Artificial Sequence: Syntheticoligonucleotide
  source 1..25: mol_type = other RNA
actgtgattcttttaggacaattac

SEQ ID NO: 3415 - DNA, 25 bp, synthetic construct
  misc_feature 1..25: note = Description of Artificial Sequence: Syntheticoligonucleotide
  misc_feature 1..25: note = Description of Combined DNA/RNA Molecule: Syntheticoligonucleotide
  source 1..25: mol_type = other DNA
  modified_base order(2,4,7,8,10,11,12,13,21,22): mod_base = OTHER; note = Uracil
ctgtgattcttttaggacaattact

SEQ ID NO: 3416 - RNA, 25 nt, synthetic construct
  misc_feature 1..25: note = Description of Artificial Sequence: Syntheticoligonucleotide
  source 1..25: mol_type = other RNA
ggtgtatgtcagatattcatattga

SEQ ID NO: 3417 - RNA, 25 nt, synthetic construct
  misc_feature 1..25: note = Description of Artificial Sequence: Syntheticoligonucleotide
  source 1..25: mol_type = other RNA
gtgtatgtcagatattcatattgac

SEQ ID NO: 3418 - DNA, 25 bp, synthetic construct
  misc_feature 1..25: note = Description of Artificial Sequence: Syntheticoligonucleotide
  misc_feature 1..25: note = Description of Combined DNA/RNA Molecule: Syntheticoligonucleotide
  source 1..25: mol_type = other DNA
  modified_base order(5,7,9,12,14,15,20,21,22,23): mod_base = OTHER; note = Uracil
caaatgtgtaatattccagttttct

SEQ ID NO: 3419 - RNA, 25 nt, synthetic construct
  misc_feature 1..25: note = Description of Artificial Sequence: Syntheticoligonucleotide
  source 1..25: mol_type = other RNA
cataagtaattaaaatatacttaaa

SEQ ID NO: 3420 - RNA, 25 nt, synthetic construct
  misc_feature 1..25: note = Description of Artificial Sequence: Syntheticoligonucleotide
  source 1..25: mol_type = other RNA
ataagtaattaaaatatacttaaaa

SEQ ID NO: 3421 - RNA, 25 nt, synthetic construct
  misc_feature 1..25: note = Description of Artificial Sequence: Syntheticoligonucleotide
  source 1..25: mol_type = other RNA
taagtaattaaaatatacttaaaaa

SEQ ID NO: 3422 - DNA, 25 bp, synthetic construct
  misc_feature 1..25: note = Description of Artificial Sequence: Syntheticoligonucleotide
  misc_feature 1..25: note = Description of Combined DNA/RNA Molecule: Syntheticoligonucleotide
  source 1..25: mol_type = other DNA
  modified_base order(4,7,8,13,15,18,19): mod_base = OTHER; note = Uracil
aagtaattaaaatatacttaaaaat

SEQ ID NO: 3423 - DNA, 25 bp, synthetic construct
  misc_feature 1..25: note = Description of Artificial Sequence: Syntheticoligonucleotide
  misc_feature 1..25: note = Description of Combined DNA/RNA Molecule: Syntheticoligonucleotide
  source 1..25: mol_type = other DNA
  modified_base order(3,6,7,12,14,17,18): mod_base = OTHER; note = Uracil
agtaattaaaatatacttaaaaatt

SEQ ID NO: 3424 - DNA, 25 bp, synthetic construct
  misc_feature 1..25: note = Description of Artificial Sequence: Syntheticoligonucleotide
  misc_feature 1..25: note = Description of Combined DNA/RNA Molecule: Syntheticoligonucleotide
  source 1..25: mol_type = other DNA
  modified_base order(2,5,6,11,13,16,17,23): mod_base = OTHER; note = Uracil
gtaattaaaatatacttaaaaatta

SEQ ID NO: 3425 - RNA, 25 nt, synthetic construct
  misc_feature 1..25: note = Description of Artificial Sequence: Syntheticoligonucleotide
  source 1..25: mol_type = other RNA
taattaaaatatacttaaaaattaa

SEQ ID NO: 3426 - DNA, 25 bp, synthetic construct
  misc_feature 1..25: note = Description of Artificial Sequence: Syntheticoligonucleotide
  misc_feature 1..25: note = Description of Combined DNA/RNA Molecule: Syntheticoligonucleotide
  source 1..25: mol_type = other DNA
  modified_base order(3,4,9,11,14,15,21,22): mod_base = OTHER; note = Uracil
aattaaaatatacttaaaaattaat

SEQ ID NO: 3427 - DNA, 25 bp, synthetic construct
  misc_feature 1..25: note = Description of Artificial Sequence: Syntheticoligonucleotide
  misc_feature 1..25: note = Description of Combined DNA/RNA Molecule: Syntheticoligonucleotide
  source 1..25: mol_type = other DNA
  modified_base order(2,3,8,10,13,14,20,21): mod_base = OTHER; note = Uracil
attaaaatatacttaaaaattaata

SEQ ID NO: 3428 - DNA, 25 bp, synthetic construct
  misc_feature 1..25: note = Description of Artificial Sequence: Syntheticoligonucleotide
  misc_feature 1..25: note = Description of Combined DNA/RNA Molecule: Syntheticoligonucleotide
  source 1..25: mol_type = other DNA
  modified_base order(1,6,8,11,12,18,19,22): mod_base = OTHER; note = Uracil
taaaatatacttaaaaattaatagt

SEQ ID NO: 3429 - DNA, 25 bp, synthetic construct
  misc_feature 1..25: note = Description of Artificial Sequence: Syntheticoligonucleotide
  misc_feature 1..25: note = Description of Combined DNA/RNA Molecule: Syntheticoligonucleotide
  source 1..25: mol_type = other DNA
  modified_base order(5,7,10,11,17,18,21): mod_base = OTHER; note = Uracil
aaaatatacttaaaaattaatagtt

SEQ ID NO: 3430 - DNA, 25 bp, synthetic construct
  misc_feature 1..25: note = Description of Artificial Sequence: Syntheticoligonucleotide
  misc_feature 1..25: note = Description of Combined DNA/RNA Molecule: Syntheticoligonucleotide
  source 1..25: mol_type = other DNA
  modified_base order(4,6,9,10,16,17,20,23): mod_base = OTHER; note = Uracil
aaatatacttaaaaattaatagttt

SEQ ID NO: 3431 - DNA, 25 bp, synthetic construct
  misc_feature 1..25: note = Description of Artificial Sequence: Syntheticoligonucleotide
  misc_feature 1..25: note = Description of Combined DNA/RNA Molecule: Syntheticoligonucleotide
  source 1..25: mol_type = other DNA
  modified_base order(3,5,8,9,15,16,19,22,23): mod_base = OTHER; note = Uracil
aatatacttaaaaattaatagtttt

SEQ ID NO: 3432 - DNA, 25 bp, synthetic construct
  misc_feature 1..25: note = Description of Artificial Sequence: Syntheticoligonucleotide
  misc_feature 1..25: note = Description of Combined DNA/RNA Molecule: Syntheticoligonucleotide
  source 1..25: mol_type = other DNA
  modified_base order(1,4,5,11,12,15,18,19,20,21,23): mod_base = OTHER; note = Uracil
tacttaaaaattaatagttttatct

SEQ ID NO: 3433 - DNA, 25 bp, synthetic construct
  misc_feature 1..25: note = Description of Artificial Sequence: Syntheticoligonucleotide
  misc_feature 1..25: note = Description of Combined DNA/RNA Molecule: Syntheticoligonucleotide
  source 1..25: mol_type = other DNA
  modified_base order(1,7,8,11,14,15,16,17,19,21): mod_base = OTHER; note = Uracil
taaaaattaatagttttatctgggt

SEQ ID NO: 3434 - DNA, 25 bp, synthetic construct
  misc_feature 1..25: note = Description of Artificial Sequence: Syntheticoligonucleotide
  misc_feature 1..25: note = Description of Combined DNA/RNA Molecule: Syntheticoligonucleotide
  source 1..25: mol_type = other DNA
  modified_base order(6,7,10,13,14,15,16,18,20): mod_base = OTHER; note = Uracil
aaaaattaatagttttatctgggta

SEQ ID NO: 3435 - RNA, 25 nt, synthetic construct
  misc_feature 1..25: note = Description of Artificial Sequence: Syntheticoligonucleotide
  source 1..25: mol_type = other RNA
aaaattaatagttttatctgggtac

SEQ ID NO: 3436 - RNA, 25 nt, synthetic construct
  misc_feature 1..25: note = Description of Artificial Sequence: Syntheticoligonucleotide
  source 1..25: mol_type = other RNA
atctgggtacaaataaacaggtgcc

SEQ ID NO: 3437 - DNA, 25 bp, synthetic construct
  misc_feature 1..25: note = Description of Artificial Sequence: Syntheticoligonucleotide
  misc_feature 1..25: note = Description of Combined DNA/RNA Molecule: Syntheticoligonucleotide
  source 1..25: mol_type = other DNA
  modified_base order(12,13,15,17,19): mod_base = OTHER; note = Uracil
gacaaggaaacttctatgtaaaaat

SEQ ID NO: 3438 - DNA, 25 bp, synthetic construct
  misc_feature 1..25: note = Description of Artificial Sequence: Syntheticoligonucleotide
  misc_feature 1..25: note = Description of Combined DNA/RNA Molecule: Syntheticoligonucleotide
  source 1..25: mol_type = other DNA
  modified_base order(11,12,14,16,18): mod_base = OTHER; note = Uracil
acaaggaaacttctatgtaaaaatc

SEQ ID NO: 3439 - RNA, 25 nt, synthetic construct
  misc_feature 1..25: note = Description of Artificial Sequence: Syntheticoligonucleotide
  source 1..25: mol_type = other RNA
caaggaaacttctatgtaaaaatca

SEQ ID NO: 3440 - DNA, 25 bp, synthetic construct
  misc_feature 1..25: note = Description of Artificial Sequence: Syntheticoligonucleotide
  misc_feature 1..25: note = Description of Combined DNA/RNA Molecule: Syntheticoligonucleotide
  source 1..25: mol_type = other DNA
  modified_base order(1,2,4,6,8,14,18,20,23): mod_base = OTHER; note = Uracil
ttctatgtaaaaatcactatgattt

SEQ ID NO: 3441 - DNA, 25 bp, synthetic construct
  misc_feature 1..25: note = Description of Artificial Sequence: Syntheticoligonucleotide
  misc_feature 1..25: note = Description of Combined DNA/RNA Molecule: Syntheticoligonucleotide
  source 1..25: mol_type = other DNA
  modified_base order(1,3,5,7,13,17,19,22,23): mod_base = OTHER; note = Uracil
tctatgtaaaaatcactatgatttc

SEQ ID NO: 3442 - DNA, 25 bp, synthetic construct
  misc_feature 1..25: note = Description of Artificial Sequence: Syntheticoligonucleotide
  misc_feature 1..25: note = Description of Combined DNA/RNA Molecule: Syntheticoligonucleotide
  source 1..25: mol_type = other DNA
  modified_base order(2,4,6,12,16,18,21,22,23): mod_base = OTHER; note = Uracil
ctatgtaaaaatcactatgatttct

SEQ ID NO: 3443 - DNA, 25 bp, synthetic construct
  misc_feature 1..25: note = Description of Artificial Sequence: Syntheticoligonucleotide
  misc_feature 1..25: note = Description of Combined DNA/RNA Molecule: Syntheticoligonucleotide
  source 1..25: mol_type = other DNA
  modified_base order(2,8,12,14,17,18,19,21): mod_base = OTHER; note = Uracil
gtaaaaatcactatgatttctgaat

SEQ ID NO: 3444 - DNA, 25 bp, synthetic construct
  misc_feature 1..25: note = Description of Artificial Sequence: Syntheticoligonucleotide
  misc_feature 1..25: note = Description of Combined DNA/RNA Molecule: Syntheticoligonucleotide
  source 1..25: mol_type = other DNA
  modified_base order(1,7,11,13,16,17,18,20): mod_base = OTHER; note = Uracil
taaaaatcactatgatttctgaatt

SEQ ID NO: 3445 - RNA, 25 nt, synthetic construct
  misc_feature 1..25: note = Description of Artificial Sequence: Syntheticoligonucleotide
  source 1..25: mol_type = other RNA
ctatgatttctgaattgctatgtga

SEQ ID NO: 3446 - RNA, 25 nt, synthetic construct
  misc_feature 1..25: note = Description of Artificial Sequence: Syntheticoligonucleotide
  source 1..25: mol_type = other RNA
tatgatttctgaattgctatgtgaa

SEQ ID NO: 3447 - RNA, 25 nt, synthetic construct
  misc_feature 1..25: note = Description of Artificial Sequence: Syntheticoligonucleotide
  source 1..25: mol_type = other RNA
tatgtgaaactacagatctttggaa

SEQ ID NO: 3448 - RNA, 25 nt, synthetic construct
  misc_feature 1..25: note = Description of Artificial Sequence: Syntheticoligonucleotide
  source 1..25: mol_type = other RNA
atgtgaaactacagatctttggaac

SEQ ID NO: 3449 - RNA, 25 nt, synthetic construct
  misc_feature 1..25: note = Description of Artificial Sequence: Syntheticoligonucleotide
  source 1..25: mol_type = other RNA
agggtgttaagacttacacagtacc

SEQ ID NO: 3450 - DNA, 25 bp, synthetic construct
  misc_feature 1..25: note = Description of Artificial Sequence: Syntheticoligonucleotide
  misc_feature 1..25: note = Description of Combined DNA/RNA Molecule: Syntheticoligonucleotide
  source 1..25: mol_type = other DNA
  modified_base order(1,2,3,9,11,12,16,17,18,19,20,23): mod_base = OTHER; note = Uracil
tttaggcctcttgaatttttgatgt

SEQ ID NO: 3451 - RNA, 25 nt, synthetic construct
  misc_feature 1..25: note = Description of Artificial Sequence: Syntheticoligonucleotide
  source 1..25: mol_type = other RNA
tcttgaatttttgatgtagatgggc

SEQ ID NO: 3452 - RNA, 25 nt, synthetic construct
  misc_feature 1..25: note = Description of Artificial Sequence: Syntheticoligonucleotide
  source 1..25: mol_type = other RNA
cttgaatttttgatgtagatgggca

SEQ ID NO: 3453 - DNA, 25 bp, synthetic construct
  misc_feature 1..25: note = Description of Artificial Sequence: Syntheticoligonucleotide
  misc_feature 1..25: note = Description of Combined DNA/RNA Molecule: Syntheticoligonucleotide
  source 1..25: mol_type = other DNA
  modified_base order(1,5,11,12,13,14,15,16,17,22): mod_base = OTHER; note = Uracil
tagatgggcatttttttaaggtagt

SEQ ID NO: 3454 - RNA, 25 nt, synthetic construct
  misc_feature 1..25: note = Description of Artificial Sequence: Syntheticoligonucleotide
  source 1..25: mol_type = other RNA
ggcatttttttaaggtagtggttaa

SEQ ID NO: 3455 - DNA, 25 bp, synthetic construct
  misc_feature 1..25: note = Description of Artificial Sequence: Syntheticoligonucleotide
  misc_feature 1..25: note = Description of Artificial Sequence: Syntheticoligonucleotide
  source 1..25: mol_type = other DNA
  modified_base order(4,7,10,11,14,15,19,20,21,23): mod_base = OTHER; note = Uracil
aggtagtggttaattacctttatgt

SEQ ID NO: 3456 - RNA, 25 nt, synthetic construct
  misc_feature 1..25: note = Description of Artificial Sequence: Syntheticoligonucleotide
  source 1..25: mol_type = other RNA
gtagtggttaattacctttatgtga

SEQ ID NO: 3457 - RNA, 25 nt, synthetic construct
  misc_feature 1..25: note = Description of Artificial Sequence: Syntheticoligonucleotide
  source 1..25: mol_type = other RNA
tagtggttaattacctttatgtgaa

SEQ ID NO: 3458 - RNA, 25 nt, synthetic construct
  misc_feature 1..25: note = Description of Artificial Sequence: Syntheticoligonucleotide
  source 1..25: mol_type = other RNA
agtggttaattacctttatgtgaac

SEQ ID NO: 3459 - DNA, 25 bp, synthetic construct
  misc_feature 1..25: note = Description of Artificial Sequence: Syntheticoligonucleotide
  misc_feature 1..25: note = Description of Combined DNA/RNA Molecule: Syntheticoligonucleotide
  source 1..25: mol_type = other DNA
  modified_base order(2,5,6,9,10,14,15,16,18,20): mod_base = OTHER; note = Uracil
gtggttaattacctttatgtgaact

SEQ ID NO: 3460 - DNA, 25 bp, synthetic construct
  misc_feature 1..25: note = Description of Artificial Sequence: Syntheticoligonucleotide
  misc_feature 1..25: note = Description of Combined DNA/RNA Molecule: Syntheticoligonucleotide
  source 1..25: mol_type = other DNA
  modified_base order(4,5,6,8,10,15,16,17,21): mod_base = OTHER; note = Uracil
acctttatgtgaactttgaatggtt

SEQ ID NO: 3461 - RNA, 25 nt, synthetic construct
  misc_feature 1..25: note = Description of Artificial Sequence: Syntheticoligonucleotide
  source 1..25: mol_type = other RNA
tatgtgaactttgaatggtttaaca

SEQ ID NO: 3462 - DNA, 25 bp, synthetic construct
  misc_feature 1..25: note = Description of Artificial Sequence: Syntheticoligonucleotide
  misc_feature 1..25: note = Description of Combined DNA/RNA Molecule: Syntheticoligonucleotide
  source 1..25: mol_type = other DNA
  modified_base order(4,5,6,10,13,14,15): mod_base = OTHER; note = Uracil
aactttgaatggtttaacaaaagat

SEQ ID NO: 3463 - DNA, 25 bp, synthetic construct
  misc_feature 1..25: note = Description of Artificial Sequence: Syntheticoligonucleotide
  misc_feature 1..25: note = Description of Combined DNA/RNA Molecule: Syntheticoligonucleotide
  source 1..25: mol_type = other DNA
  modified_base order(1,2,6,9,10,11,21,22,23): mod_base = OTHER; note = Uracil
ttgaatggtttaacaaaagatttgt

SEQ ID NO: 3464 - DNA, 25 bp, synthetic construct
  misc_feature 1..25: note = Description of Artificial Sequence: Syntheticoligonucleotide
  misc_feature 1..25: note = Description of Combined DNA/RNA Molecule: Syntheticoligonucleotide
  source 1..25: mol_type = other DNA
  modified_base order(1,5,8,9,10,20,21,22): mod_base = OTHER; note = Uracil
tgaatggtttaacaaaagatttgtt

SEQ ID NO: 3465 - DNA, 25 bp, synthetic construct
  misc_feature 1..25: note = Description of Artificial Sequence: Syntheticoligonucleotide
  misc_feature 1..25: note = Description of Combined DNA/RNA Molecule: Syntheticoligonucleotide
  source 1..25: mol_type = other DNA
  modified_base order(4,7,8,9,19,20,21,23): mod_base = OTHER; note = Uracil
gaatggtttaacaaaagatttgttt

SEQ ID NO: 3466 - DNA, 25 bp, synthetic construct
  misc_feature 1..25: note = Description of Artificial Sequence: Syntheticoligonucleotide
  misc_feature 1..25: note = Description of Combined DNA/RNA Molecule: Syntheticoligonucleotide
  source 1..25: mol_type = other DNA
  modified_base order(3,6,7,8,18,19,20,22,23): mod_base = OTHER; note = Uracil
aatggtttaacaaaagatttgtttt

SEQ ID NO: 3467 - DNA, 25 bp, synthetic construct
  misc_feature 1..25: note = Description of Artificial Sequence: Syntheticoligonucleotide
  misc_feature 1..25: note = Description of Combined DNA/RNA Molecule: Syntheticoligonucleotide
  source 1..25: mol_type = other DNA
  modified_base order(2,5,6,7,17,18,19,21,22,23): mod_base = OTHER; note = Uracil
atggtttaacaaaagatttgttttt

SEQ ID NO: 3468 - DNA, 25 bp, synthetic construct
  misc_feature 1..25: note = Description of Artificial Sequence: Syntheticoligonucleotide
  misc_feature 1..25: note = Description of Combined DNA/RNA Molecule: Syntheticoligonucleotide
  source 1..25: mol_type = other DNA
  modified_base order(3,4,5,15,16,17,19,20,21,22,23): mod_base = OTHER; note = Uracil
ggtttaacaaaagatttgtttttgt

SEQ ID NO: 3469 - DNA, 25 bp, synthetic construct
  misc_feature 1..25: note = Description of Artificial Sequence: Syntheticoligonucleotide
  misc_feature 1..25: note = Description of Combined DNA/RNA Molecule: Syntheticoligonucleotide
  source 1..25: mol_type = other DNA
  modified_base order(2,3,4,14,15,16,18,19,20,21,22): mod_base = OTHER; note = Uracil
gtttaacaaaagatttgtttttgta

SEQ ID NO: 3470 - RNA, 25 nt, synthetic construct
  misc_feature 1..25: note = Description of Artificial Sequence: Syntheticoligonucleotide
  source 1..25: mol_type = other RNA
aacaaaagatttgtttttgtagaga

SEQ ID NO: 3471 - DNA, 25 bp, synthetic construct
  misc_feature 1..25: note = Description of Artificial Sequence: Syntheticoligonucleotide
  misc_feature 1..25: note = Description of Combined DNA/RNA Molecule: Syntheticoligonucleotide
  source 1..25: mol_type = other DNA
  modified_base order(9,10,11,13,14,15,16,17,19): mod_base = OTHER; note = Uracil
acaaaagatttgtttttgtagagat

SEQ ID NO: 3472 - DNA, 25 bp, synthetic construct
  misc_feature 1..25: note = Description of Artificial Sequence: Syntheticoligonucleotide
  misc_feature 1..25: note = Description of Combined DNA/RNA Molecule: Syntheticoligonucleotide
  source 1..25: mol_type = other DNA
  modified_base order(8,9,10,12,13,14,15,16,18): mod_base = OTHER; note = Uracil
caaaagatttgtttttgtagagatt

SEQ ID NO: 3473 - DNA, 25 bp, synthetic construct
  misc_feature 1..25: note = Description of Artificial Sequence: Syntheticoligonucleotide
  misc_feature 1..25: note = Description of Combined DNA/RNA Molecule: Syntheticoligonucleotide
  source 1..25: mol_type = other DNA
  modified_base order(6,7,8,10,11,12,13,14,16,22,23): mod_base = OTHER; note = Uracil
aaagatttgtttttgtagagatttt

SEQ ID NO: 3474 - DNA, 25 bp, synthetic construct
  misc_feature 1..25: note = Description of Artificial Sequence: Syntheticoligonucleotide
  misc_feature 1..25: note = Description of Combined DNA/RNA Molecule: Syntheticoligonucleotide
  source 1..25: mol_type = other DNA
  modified_base order(5,6,7,9,10,11,12,13,15,21,22,23): mod_base = OTHER; note = Uracil
aagatttgtttttgtagagatttta

SEQ ID NO: 3475 - RNA, 25 nt, synthetic construct
  misc_feature 1..25: note = Description of Artificial Sequence: Syntheticoligonucleotide
  source 1..25: mol_type = other RNA
agatttgtttttgtagagattttaa

SEQ ID NO: 3476 - RNA, 25 nt, synthetic construct
  misc_feature 1..25: note = Description of Artificial Sequence: Syntheticoligonucleotide
  source 1..25: mol_type = other RNA
gatttgtttttgtagagattttaaa

SEQ ID NO: 3477 - RNA, 25 nt, synthetic construct
  misc_feature 1..25: note = Description of Artificial Sequence: Syntheticoligonucleotide
  source 1..25: mol_type = other RNA
tttttgtagagattttaaaggggga

SEQ ID NO: 3478 - DNA, 25 bp, synthetic construct
  misc_feature 1..25: note = Description of Artificial Sequence: Syntheticoligonucleotide
  misc_feature 1..25: note = Description of Combined DNA/RNA Molecule: Syntheticoligonucleotide
  source 1..25: mol_type = other DNA
  modified_base order(12,13,15,21): mod_base = OTHER; note = Uracil
aagggggagaattctagaaataaat

SEQ ID NO: 3479 - DNA, 25 bp, synthetic construct
  misc_feature 1..25: note = Description of Artificial Sequence: Syntheticoligonucleotide
  misc_feature 1..25: note = Description of Combined DNA/RNA Molecule: Syntheticoligonucleotide
  source 1..25: mol_type = other DNA
  modified_base order(10,11,13,19,23): mod_base = OTHER; note = Uracil
gggggagaattctagaaataaatgt

SEQ ID NO: 3480 - DNA, 25 bp, synthetic construct
  misc_feature 1..25: note = Description of Artificial Sequence: Syntheticoligonucleotide
  misc_feature 1..25: note = Description of Combined DNA/RNA Molecule: Syntheticoligonucleotide
  source 1..25: mol_type = other DNA
  modified_base order(9,10,12,18,22): mod_base = OTHER; note = Uracil
ggggagaattctagaaataaatgtt

SEQ ID NO: 3481 - DNA, 25 bp, synthetic construct
  misc_feature 1..25: note = Description of Artificial Sequence: Syntheticoligonucleotide
  misc_feature 1..25: note = Description of Combined DNA/RNA Molecule: Syntheticoligonucleotide
  source 1..25: mol_type = other DNA
  modified_base order(8,9,11,17,21,23): mod_base = OTHER; note = Uracil
gggagaattctagaaataaatgtta

SEQ ID NO: 3482 - RNA, 25 nt, synthetic construct
  misc_feature 1..25: note = Description of Artificial Sequence: Syntheticoligonucleotide
  source 1..25: mol_type = other RNA
ggagaattctagaaataaatgttac

SEQ ID NO: 3483 - RNA, 25 nt, synthetic construct
  misc_feature 1..25: note = Description of Artificial Sequence: Syntheticoligonucleotide
  source 1..25: mol_type = other RNA
gagaattctagaaataaatgttacc

SEQ ID NO: 3484 - DNA, 25 bp, synthetic construct
  misc_feature 1..25: note = Description of Artificial Sequence: Syntheticoligonucleotide
  misc_feature 1..25: note = Description of Combined DNA/RNA Molecule: Syntheticoligonucleotide
  source 1..25: mol_type = other DNA
  modified_base order(1,2,4,10,14,16,17,21): mod_base = OTHER; note = Uracil
ttctagaaataaatgttacctaatt

SEQ ID NO: 3485 - DNA, 25 bp, synthetic construct
  misc_feature 1..25: note = Description of Artificial Sequence: Syntheticoligonucleotide
  misc_feature 1..25: note = Description of Combined DNA/RNA Molecule: Syntheticoligonucleotide
  source 1..25: mol_type = other DNA
  modified_base order(1,3,9,13,15,16,20,23): mod_base = OTHER; note = Uracil
tctagaaataaatgttacctaatta

SEQ ID NO: 3486 - DNA, 25 bp, synthetic construct
  misc_feature 1..25: note = Description of Artificial Sequence: Syntheticoligonucleotide
  misc_feature 1..25: note = Description of Combined DNA/RNA Molecule: Syntheticoligonucleotide
  source 1..25: mol_type = other DNA
  modified_base order(2,8,12,14,15,19,22,23): mod_base = OTHER; note = Uracil
ctagaaataaatgttacctaattat

SEQ ID NO: 3487 - DNA, 25 bp, synthetic construct
  misc_feature 1..25: note = Description of Artificial Sequence: Syntheticoligonucleotide
  misc_feature 1..25: note = Description of Combined DNA/RNA Molecule: Syntheticoligonucleotide
  source 1..25: mol_type = other DNA
  modified_base order(1,7,11,13,14,18,21,22): mod_base = OTHER; note = Uracil
tagaaataaatgttacctaattatt

SEQ ID NO: 3488 - DNA, 25 bp, synthetic construct
  misc_feature 1..25: note = Description of Artificial Sequence: Syntheticoligonucleotide
  misc_feature 1..25: note = Description of Combined DNA/RNA Molecule: Syntheticoligonucleotide
  source 1..25: mol_type = other DNA
  modified_base order(6,10,12,13,17,20,21,23): mod_base = OTHER; note = Uracil
agaaataaatgttacctaattatta

SEQ ID NO: 3489 - RNA, 25 nt, synthetic construct
  misc_feature 1..25: note = Description of Artificial Sequence: Syntheticoligonucleotide
  source 1..25: mol_type = other RNA
aaataaatgttacctaattattaca

SEQ ID NO: 3490 - RNA, 25 nt, synthetic construct
  misc_feature 1..25: note = Description of Artificial Sequence: Syntheticoligonucleotide
  source 1..25: mol_type = other RNA
acctaattattacagccttaaagac

SEQ ID NO: 3491 - RNA, 25 nt, synthetic construct
  misc_feature 1..25: note = Description of Artificial Sequence: Syntheticoligonucleotide
  source 1..25: mol_type = other RNA
cctaattattacagccttaaagaca

SEQ ID NO: 3492 - RNA, 25 nt, synthetic construct
  misc_feature 1..25: note = Description of Artificial Sequence: Syntheticoligonucleotide
  source 1..25: mol_type = other RNA
ccttaaagacaaaaatccttgttga

SEQ ID NO: 3493 - DNA, 25 bp, synthetic construct
  misc_feature 1..25: note = Description of Artificial Sequence: Syntheticoligonucleotide
  misc_feature 1..25: note = Description of Combined DNA/RNA Molecule: Syntheticoligonucleotide
  source 1..25: mol_type = other DNA
  modified_base order(1,13,16,17,19,20): mod_base = OTHER; note = Uracil
taaagacaaaaatccttgttgaagt

SEQ ID NO: 3494 - RNA, 25 nt, synthetic construct
  misc_feature 1..25: note = Description of Artificial Sequence: Syntheticoligonucleotide
  source 1..25: mol_type = other RNA
tccttgttgaagtttttttaaaaaa

SEQ ID NO: 3495 - RNA, 25 nt, synthetic construct
  misc_feature 1..25: note = Description of Artificial Sequence: Syntheticoligonucleotide
  source 1..25: mol_type = other RNA
ccttgttgaagtttttttaaaaaaa

SEQ ID NO: 3496 - RNA, 25 nt, synthetic construct
  misc_feature 1..25: note = Description of Artificial Sequence: Syntheticoligonucleotide
  source 1..25: mol_type = other RNA
ttgttgaagtttttttaaaaaaagc

SEQ ID NO: 3497 - DNA, 25 bp, synthetic construct
  misc_feature 1..25: note = Description of Artificial Sequence: Syntheticoligonucleotide
  misc_feature 1..25: note = Description of Combined DNA/RNA Molecule: Syntheticoligonucleotide
  source 1..25: mol_type = other DNA
  modified_base order(1,3,4,9,10,11,12,13,14,15): mod_base = OTHER; note = Uracil
tgttgaagtttttttaaaaaaagct

SEQ ID NO: 3498 - DNA, 25 bp, synthetic construct
  misc_feature 1..25: note = Description of Artificial Sequence: Syntheticoligonucleotide
  misc_feature 1..25: note = Description of Combined DNA/RNA Molecule: Syntheticoligonucleotide
  source 1..25: mol_type = other DNA
  modified_base order(5,6,7,8,9,10,11,21): mod_base = OTHER; note = Uracil
gaagtttttttaaaaaaagctaaat

SEQ ID NO: 3499 - DNA, 25 bp, synthetic construct
  misc_feature 1..25: note = Description of Artificial Sequence: Syntheticoligonucleotide
  misc_feature 1..25: note = Description of Combined DNA/RNA Molecule: Syntheticoligonucleotide
  source 1..25: mol_type = other DNA
  modified_base order(4,5,6,7,8,9,10,20): mod_base = OTHER; note = Uracil
aagtttttttaaaaaaagctaaatt

SEQ ID NO: 3500 - DNA, 25 bp, synthetic construct
  misc_feature 1..25: note = Description of Artificial Sequence: Syntheticoligonucleotide
  misc_feature 1..25: note = Description of Combined DNA/RNA Molecule: Syntheticoligonucleotide
  source 1..25: mol_type = other DNA
  modified_base order(3,4,5,6,7,8,9,19,23): mod_base = OTHER; note = Uracil
agtttttttaaaaaaagctaaatta

SEQ ID NO: 3501 - RNA, 25 nt, synthetic construct
  misc_feature 1..25: note = Description of Artificial Sequence: Syntheticoligonucleotide
  source 1..25: mol_type = other RNA
gtttttttaaaaaaagctaaattac

SEQ ID NO: 3502 - RNA, 25 nt, synthetic construct
  misc_feature 1..25: note = Description of Artificial Sequence: Syntheticoligonucleotide
  source 1..25: mol_type = other RNA
tttttttaaaaaaagctaaattaca

SEQ ID NO: 3503 - RNA, 25 nt, synthetic construct
  misc_feature 1..25: note = Description of Artificial Sequence: Syntheticoligonucleotide
  source 1..25: mol_type = other RNA
tttaaaaaaagctaaattacataga

SEQ ID NO: 3504 - DNA, 25 bp, synthetic construct
  misc_feature 1..25: note = Description of Artificial Sequence: Syntheticoligonucleotide
  misc_feature 1..25: note = Description of Combined DNA/RNA Molecule: Syntheticoligonucleotide
  source 1..25: mol_type = other DNA
  modified_base order(1,11,15,16,20): mod_base = OTHER; note = Uracil
taaaaaaagctaaattacatagact

SEQ ID NO: 3505 - RNA, 25 nt, synthetic construct
  misc_feature 1..25: note = Description of Artificial Sequence: Syntheticoligonucleotide
  source 1..25: mol_type = other RNA
acttaggcattaacatgtttgtgga

SEQ ID NO: 3506 - RNA, 25 nt, synthetic construct
  misc_feature 1..25: note = Description of Artificial Sequence: Syntheticoligonucleotide
  source 1..25: mol_type = other RNA
cttaggcattaacatgtttgtggaa

SEQ ID NO: 3507 - RNA, 25 nt, synthetic construct
  misc_feature 1..25: note = Description of Artificial Sequence: Syntheticoligonucleotide
  source 1..25: mol_type = other RNA
agcagacgtatattgtatcatttga

SEQ ID NO: 3508 - RNA, 25 nt, synthetic construct
  misc_feature 1..25: note = Description of Artificial Sequence: Syntheticoligonucleotide
  source 1..25: mol_type = other RNA
gacgtatattgtatcatttgagtga

SEQ ID NO: 3509 - DNA, 25 bp, synthetic construct
  misc_feature 1..25: note = Description of Artificial Sequence: Syntheticoligonucleotide
  misc_feature 1..25: note = Description of Combined DNA/RNA Molecule: Syntheticoligonucleotide
  source 1..25: mol_type = other DNA
  modified_base order(3,5,7,8,10,12,15,16,17,21): mod_base = OTHER; note = Uracil
cgtatattgtatcatttgagtgaat

SEQ ID NO: 3510 - DNA, 25 bp, synthetic construct
  misc_feature 1..25: note = Description of Artificial Sequence: Syntheticoligonucleotide
  misc_feature 1..25: note = Description of Combined DNA/RNA Molecule: Syntheticoligonucleotide
  source 1..25: mol_type = other DNA
  modified_base order(2,4,5,7,9,12,13,14,18,22): mod_base = OTHER; note = Uracil
atattgtatcatttgagtgaatgtt

SEQ ID NO: 3511 - DNA, 25 bp, synthetic construct
  misc_feature 1..25: note = Description of Artificial Sequence: Syntheticoligonucleotide
  misc_feature 1..25: note = Description of Combined DNA/RNA Molecule: Syntheticoligonucleotide
  source 1..25: mol_type = other DNA
  modified_base order(1,3,4,6,8,11,12,13,17,21,23): mod_base = OTHER; note = Uracil
tattgtatcatttgagtgaatgttc

SEQ ID NO: 3512 - RNA, 25 nt, synthetic construct
  misc_feature 1..25: note = Description of Artificial Sequence: Syntheticoligonucleotide
  source 1..25: mol_type = other RNA
attgtatcatttgagtgaatgttcc

SEQ ID NO: 3513 - DNA, 25 bp, synthetic construct
  misc_feature 1..25: note = Description of Artificial Sequence: Syntheticoligonucleotide
  misc_feature 1..25: note = Description of Combined DNA/RNA Molecule: Syntheticoligonucleotide
  source 1..25: mol_type = other DNA
  modified_base order(2,8,9,10,17,21,22,23): mod_base = OTHER; note = Uracil
ataggaatttagaacctaactttta

SEQ ID NO: 3514 - DNA, 25 bp, synthetic construct
  misc_feature 1..25: note = Description of Artificial Sequence: Syntheticoligonucleotide
  misc_feature 1..25: note = Description of Combined DNA/RNA Molecule: Syntheticoligonucleotide
  source 1..25: mol_type = other DNA
  modified_base order(1,7,8,9,16,20,21,22,23): mod_base = OTHER; note = Uracil
taggaatttagaacctaacttttat

SEQ ID NO: 3515 - DNA, 25 bp, synthetic construct
  misc_feature 1..25: note = Description of Artificial Sequence: Syntheticoligonucleotide
  misc_feature 1..25: note = Description of Combined DNA/RNA Molecule: Syntheticoligonucleotide
  source 1..25: mol_type = other DNA
  modified_base order(3,4,5,12,16,17,18,19,21): mod_base = OTHER; note = Uracil
aatttagaacctaacttttataggt

SEQ ID NO: 3516 - DNA, 25 bp, synthetic construct
  misc_feature 1..25: note = Description of Artificial Sequence: Syntheticoligonucleotide
  misc_feature 1..25: note = Description of Combined DNA/RNA Molecule: Syntheticoligonucleotide
  source 1..25: mol_type = other DNA
  modified_base order(2,3,4,11,15,16,17,18,20): mod_base = OTHER; note = Uracil
atttagaacctaacttttataggtt

SEQ ID NO: 3517 - DNA, 25 bp, synthetic construct
  misc_feature 1..25: note = Description of Artificial Sequence: Syntheticoligonucleotide
  misc_feature 1..25: note = Description of Combined DNA/RNA Molecule: Syntheticoligonucleotide
  source 1..25: mol_type = other DNA
  modified_base order(1,2,3,10,14,15,16,17,19,23): mod_base = OTHER; note = Uracil
tttagaacctaacttttataggtta

SEQ ID NO: 3518 - DNA, 25 bp, synthetic construct
  misc_feature 1..25: note = Description of Artificial Sequence: Syntheticoligonucleotide
  misc_feature 1..25: note = Description of Combined DNA/RNA Molecule: Syntheticoligonucleotide
  source 1..25: mol_type = other DNA
  modified_base order(1,2,9,13,14,15,16,18,22,23): mod_base = OTHER; note = Uracil
ttagaacctaacttttataggttat

SEQ ID NO: 3519 - DNA, 25 bp, synthetic construct
  misc_feature 1..25: note = Description of Artificial Sequence: Syntheticoligonucleotide
  misc_feature 1..25: note = Description of Combined DNA/RNA Molecule: Syntheticoligonucleotide
  source 1..25: mol_type = other DNA
  modified_base order(1,2,3,4,6,10,11,13,20,22,23): mod_base = OTHER; note = Uracil
ttttataggttatcaaaactgttgt

SEQ ID NO: 3520 - RNA, 25 nt, synthetic construct
  misc_feature 1..25: note = Description of Artificial Sequence: Syntheticoligonucleotide
  source 1..25: mol_type = other RNA
ttataggttatcaaaactgttgtca

SEQ ID NO: 3521 - RNA, 25 nt, synthetic construct
  misc_feature 1..25: note = Description of Artificial Sequence: Syntheticoligonucleotide
  source 1..25: mol_type = other RNA
aattttgtcctaatatatacataga

SEQ ID NO: 3522 - RNA, 25 nt, synthetic construct
  misc_feature 1..25: note = Description of Artificial Sequence: Syntheticoligonucleotide
  source 1..25: mol_type = other RNA
attttgtcctaatatatacatagaa

SEQ ID NO: 3523 - RNA, 25 nt, synthetic construct
  misc_feature 1..25: note = Description of Artificial Sequence: Syntheticoligonucleotide
  source 1..25: mol_type = other RNA
ttttgtcctaatatatacatagaaa

SEQ ID NO: 3524 - DNA, 25 bp, synthetic construct
  misc_feature 1..25: note = Description of Artificial Sequence: Syntheticoligonucleotide
  misc_feature 1..25: note = Description of Combined DNA/RNA Molecule: Syntheticoligonucleotide
  source 1..25: mol_type = other DNA
  modified_base order(3,6,8,10,14,21,22,23): mod_base = OTHER; note = Uracil
cctaatatatacatagaaactttgt

SEQ ID NO: 3525 - RNA, 25 nt, synthetic construct
  misc_feature 1..25: note = Description of Artificial Sequence: Syntheticoligonucleotide
  source 1..25: mol_type = other RNA
tatatacatagaaactttgtggggc

SEQ ID NO: 3526 - RNA, 25 nt, synthetic construct
  misc_feature 1..25: note = Description of Artificial Sequence: Syntheticoligonucleotide
  source 1..25: mol_type = other RNA
cacaagttcatctcatttgtattcc

SEQ ID NO: 3527 - DNA, 25 bp, synthetic construct
  misc_feature 1..25: note = Description of Artificial Sequence: Syntheticoligonucleotide
  misc_feature 1..25: note = Description of Combined DNA/RNA Molecule: Syntheticoligonucleotide
  source 1..25: mol_type = other DNA
  modified_base order(2,5,6,7,9,11,12,16,17,20,21,22,23): mod_base = OTHER; note = Uracil
ctcatttgtattccattgatttttt

SEQ ID NO: 3528 - DNA, 25 bp, synthetic construct
  misc_feature 1..25: note = Description of Artificial Sequence: Syntheticoligonucleotide
  misc_feature 1..25: note = Description of Combined DNA/RNA Molecule: Syntheticoligonucleotide
  source 1..25: mol_type = other DNA
  modified_base order(1,4,5,6,8,10,11,15,16,19,20,21,22,23): mod_base = OTHER; note = Uracil
tcatttgtattccattgattttttt

SEQ ID NO: 3529 - DNA, 25 bp, synthetic construct
  misc_feature 1..25: note = Description of Artificial Sequence: Syntheticoligonucleotide
  misc_feature 1..25: note = Description of Combined DNA/RNA Molecule: Syntheticoligonucleotide
  source 1..25: mol_type = other DNA
  modified_base order(3,4,5,7,9,10,14,15,18,19,20,21,22,23): mod_base = OTHER; note = Uracil
catttgtattccattgatttttttt

SEQ ID NO: 3530 - DNA, 25 bp, synthetic construct
  misc_feature 1..25: note = Description of Artificial Sequence: Syntheticoligonucleotide
  misc_feature 1..25: note = Description of Combined DNA/RNA Molecule: Syntheticoligonucleotide
  source 1..25: mol_type = other DNA
  modified_base order(2,3,4,6,8,9,13,14,17,18,19,20,21,22,23): mod_base = OTHER; note = Uracil
atttgtattccattgattttttttt

SEQ ID NO: 3531 - DNA, 25 bp, synthetic construct
  misc_feature 1..25: note = Description of Artificial Sequence: Syntheticoligonucleotide
  misc_feature 1..25: note = Description of Combined DNA/RNA Molecule: Syntheticoligonucleotide
  source 1..25: mol_type = other DNA
  modified_base order(1,2,3,5,7,8,12,13,16,17,18,19,20,21,22,23): mod_base = OTHER; note = Uracil
tttgtattccattgatttttttttt

SEQ ID NO: 3532 - DNA, 25 bp, synthetic construct
  misc_feature 1..25: note = Description of Artificial Sequence: Syntheticoligonucleotide
  misc_feature 1..25: note = Description of Combined DNA/RNA Molecule: Syntheticoligonucleotide
  source 1..25: mol_type = other DNA
  modified_base order(1,2,4,6,7,11,12,15,16,17,18,19,20,21,22,23): mod_base = OTHER; note = Uracil
ttgtattccattgattttttttttc

SEQ ID NO: 3533 - DNA, 25 bp, synthetic construct
  misc_feature 1..25: note = Description of Artificial Sequence: Syntheticoligonucleotide
  misc_feature 1..25: note = Description of Combined DNA/RNA Molecule: Syntheticoligonucleotide
  source 1..25: mol_type = other DNA
  modified_base order(1,3,5,6,10,11,14,15,16,17,18,19,20,21,22,23): mod_base = OTHER; note = Uracil
tgtattccattgattttttttttct

SEQ ID NO: 3534 - RNA, 25 nt, synthetic construct
  misc_feature 1..25: note = Description of Artificial Sequence: Syntheticoligonucleotide
  source 1..25: mol_type = other RNA
cattgattttttttttcttctaaac

SEQ ID NO: 3535 - RNA, 25 nt, synthetic construct
  misc_feature 1..25: note = Description of Artificial Sequence: Syntheticoligonucleotide
  source 1..25: mol_type = other RNA
attgattttttttttcttctaaaca

SEQ ID NO: 3536 - DNA, 25 bp, synthetic construct
  misc_feature 1..25: note = Description of Artificial Sequence: Syntheticoligonucleotide
  misc_feature 1..25: note = Description of Combined DNA/RNA Molecule: Syntheticoligonucleotide
  source 1..25: mol_type = other DNA
  modified_base order(2,3,4,5,6,7,8,9,10,11,13,14,16,22,23): mod_base = OTHER; note = Uracil
attttttttttcttctaaacatttt

SEQ ID NO: 3537 - DNA, 25 bp, synthetic construct
  misc_feature 1..25: note = Description of Artificial Sequence: Syntheticoligonucleotide
  misc_feature 1..25: note = Description of Combined DNA/RNA Molecule: Syntheticoligonucleotide
  source 1..25: mol_type = other DNA
  modified_base order(1,2,3,4,5,6,7,8,9,10,12,13,15,21,22,23): mod_base = OTHER; note = Uracil
ttttttttttcttctaaacattttt

SEQ ID NO: 3538 - DNA, 25 bp, synthetic construct
  misc_feature 1..25: note = Description of Artificial Sequence: Syntheticoligonucleotide
  misc_feature 1..25: note = Description of Combined DNA/RNA Molecule: Syntheticoligonucleotide
  source 1..25: mol_type = other DNA
  modified_base order(1,2,3,4,5,6,7,8,9,11,12,14,20,21,22,23): mod_base = OTHER; note = Uracil
tttttttttcttctaaacatttttt

SEQ ID NO: 3539 - DNA, 25 bp, synthetic construct
  misc_feature 1..25: note = Description of Artificial Sequence: Syntheticoligonucleotide
  misc_feature 1..25: note = Description of Combined DNA/RNA Molecule: Syntheticoligonucleotide
  source 1..25: mol_type = other DNA
  modified_base order(1,2,3,4,5,6,7,8,10,11,13,19,20,21,22,23): mod_base = OTHER; note = Uracil
ttttttttcttctaaacattttttc

SEQ ID NO: 3540 - DNA, 25 bp, synthetic construct
  misc_feature 1..25: note = Description of Artificial Sequence: Syntheticoligonucleotide
  misc_feature 1..25: note = Description of Combined DNA/RNA Molecule: Syntheticoligonucleotide
  source 1..25: mol_type = other DNA
  modified_base order(1,2,3,4,5,6,7,9,10,12,18,19,20,21,22,23): mod_base = OTHER; note = Uracil
tttttttcttctaaacattttttct

SEQ ID NO: 3541 - DNA, 25 bp, synthetic construct
  misc_feature 1..25: note = Description of Artificial Sequence: Syntheticoligonucleotide
  misc_feature 1..25: note = Description of Combined DNA/RNA Molecule: Syntheticoligonucleotide
  source 1..25: mol_type = other DNA
  modified_base order(5,6,7,8,9,10,12,13,21,23): mod_base = OTHER; note = Uracil
aacattttttcttcaaacagtatat

SEQ ID NO: 3542 - DNA, 25 bp, synthetic construct
  misc_feature 1..25: note = Description of Artificial Sequence: Syntheticoligonucleotide
  misc_feature 1..25: note = Description of Combined DNA/RNA Molecule: Syntheticoligonucleotide
  source 1..25: mol_type = other DNA
  modified_base order(4,5,6,7,8,9,11,12,20,22): mod_base = OTHER; note = Uracil
acattttttcttcaaacagtatata

SEQ ID NO: 3543 - RNA, 25 nt, synthetic construct
  misc_feature 1..25: note = Description of Artificial Sequence: Syntheticoligonucleotide
  source 1..25: mol_type = other RNA
cattttttcttcaaacagtatataa

SEQ ID NO: 3544 - RNA, 25 nt, synthetic construct
  misc_feature 1..25: note = Description of Artificial Sequence: Syntheticoligonucleotide
  source 1..25: mol_type = other RNA
attttttcttcaaacagtatataac

SEQ ID NO: 3545 - DNA, 25 bp, synthetic construct
  misc_feature 1..25: note = Description of Artificial Sequence: Syntheticoligonucleotide
  misc_feature 1..25: note = Description of Combined DNA/RNA Molecule: Syntheticoligonucleotide
  source 1..25: mol_type = other DNA
  modified_base order(1,2,3,4,5,6,8,9,17,19,21): mod_base = OTHER; note = Uracil
ttttttcttcaaacagtatataact

SEQ ID NO: 3546 - DNA, 25 bp, synthetic construct
  misc_feature 1..25: note = Description of Artificial Sequence: Syntheticoligonucleotide
  misc_feature 1..25: note = Description of Combined DNA/RNA Molecule: Syntheticoligonucleotide
  source 1..25: mol_type = other DNA
  modified_base order(1,2,10,12,14,18,19,20,21,22,23): mod_base = OTHER; note = Uracil
ttcaaacagtatataacttttttta

SEQ ID NO: 3547 - RNA, 25 nt, synthetic construct
  misc_feature 1..25: note = Description of Artificial Sequence: Syntheticoligonucleotide
  source 1..25: mol_type = other RNA
acagtatataactttttttagggga

SEQ ID NO: 3548 - DNA, 25 bp, synthetic construct
  misc_feature 1..25: note = Description of Artificial Sequence: Syntheticoligonucleotide
  misc_feature 1..25: note = Description of Combined DNA/RNA Molecule: Syntheticoligonucleotide
  source 1..25: mol_type = other DNA
  modified_base order(4,6,8,12,13,14,15,16,17,18): mod_base = OTHER; note = Uracil
cagtatataactttttttaggggat

SEQ ID NO: 3549 - DNA, 25 bp, synthetic construct
  misc_feature 1..25: note = Description of Artificial Sequence: Syntheticoligonucleotide
  misc_feature 1..25: note = Description of Combined DNA/RNA Molecule: Syntheticoligonucleotide
  source 1..25: mol_type = other DNA
  modified_base order(3,5,7,11,12,13,14,15,16,17): mod_base = OTHER; note = Uracil
agtatataactttttttaggggatt

SEQ ID NO: 3550 - DNA, 25 bp, synthetic construct
  misc_feature 1..25: note = Description of Artificial Sequence: Syntheticoligonucleotide
  misc_feature 1..25: note = Description of Combined DNA/RNA Molecule: Syntheticoligonucleotide
  source 1..25: mol_type = other DNA
  modified_base order(2,4,6,10,11,12,13,14,15,16,23): mod_base = OTHER; note = Uracil
gtatataactttttttaggggattt

SEQ ID NO: 3551 - DNA, 25 bp, synthetic construct
  misc_feature 1..25: note = Description of Artificial Sequence: Syntheticoligonucleotide
  misc_feature 1..25: note = Description of Combined DNA/RNA Molecule: Syntheticoligonucleotide
  source 1..25: mol_type = other DNA
  modified_base order(4,5,6,7,8,9,10,17,18,19,20,21,22,23): mod_base = OTHER; note = Uracil
aactttttttaggggattttttttt

SEQ ID NO: 3552 - DNA, 25 bp, synthetic construct
  misc_feature 1..25: note = Description of Artificial Sequence: Syntheticoligonucleotide
  misc_feature 1..25: note = Description of Combined DNA/RNA Molecule: Syntheticoligonucleotide
  source 1..25: mol_type = other DNA
  modified_base order(3,4,5,6,7,8,9,16,17,18,19,20,21,22,23): mod_base = OTHER; note = Uracil
actttttttaggggattttttttta

SEQ ID NO: 3553 - RNA, 25 nt, synthetic construct
  misc_feature 1..25: note = Description of Artificial Sequence: Syntheticoligonucleotide
  source 1..25: mol_type = other RNA
gggatttttttttagacagcaaaaa

SEQ ID NO: 3554 - RNA, 25 nt, synthetic construct
  misc_feature 1..25: note = Description of Artificial Sequence: Syntheticoligonucleotide
  source 1..25: mol_type = other RNA
ggatttttttttagacagcaaaaac

SEQ ID NO: 3555 - DNA, 25 bp, synthetic construct
  misc_feature 1..25: note = Description of Artificial Sequence: Syntheticoligonucleotide
  misc_feature 1..25: note = Description of Combined DNA/RNA Molecule: Syntheticoligonucleotide
  source 1..25: mol_type = other DNA
  modified_base order(3,4,5,6,7,8,9,10,11): mod_base = OTHER; note = Uracil
gatttttttttagacagcaaaaact

SEQ ID NO: 3556 - DNA, 25 bp, synthetic construct
  misc_feature 1..25: note = Description of Artificial Sequence: Syntheticoligonucleotide
  misc_feature 1..25: note = Description of Combined DNA/RNA Molecule: Syntheticoligonucleotide
  source 1..25: mol_type = other DNA
  modified_base order(1,7,8,9,13,14,15,17): mod_base = OTHER; note = Uracil
tgaagatttccatttgtcaaaaagt

SEQ ID NO: 3557 - DNA, 25 bp, synthetic construct
  misc_feature 1..25: note = Description of Artificial Sequence: Syntheticoligonucleotide
  misc_feature 1..25: note = Description of Combined DNA/RNA Molecule: Syntheticoligonucleotide
  source 1..25: mol_type = other DNA
  modified_base order(6,7,8,12,13,14,16): mod_base = OTHER; note = Uracil
gaagatttccatttgtcaaaaagta

SEQ ID NO: 3558 - RNA, 25 nt, synthetic construct
  misc_feature 1..25: note = Description of Artificial Sequence: Syntheticoligonucleotide
  source 1..25: mol_type = other RNA
aagatttccatttgtcaaaaagtaa

SEQ ID NO: 3559 - DNA, 25 bp, synthetic construct
  misc_feature 1..25: note = Description of Artificial Sequence: Syntheticoligonucleotide
  misc_feature 1..25: note = Description of Combined DNA/RNA Molecule: Syntheticoligonucleotide
  source 1..25: mol_type = other DNA
  modified_base order(4,5,6,10,11,12,14,22): mod_base = OTHER; note = Uracil
agatttccatttgtcaaaaagtaat

SEQ ID NO: 3560 - DNA, 25 bp, synthetic construct
  misc_feature 1..25: note = Description of Artificial Sequence: Syntheticoligonucleotide
  misc_feature 1..25: note = Description of Combined DNA/RNA Molecule: Syntheticoligonucleotide
  source 1..25: mol_type = other DNA
  modified_base order(1,5,6,7,9,17,20,23): mod_base = OTHER; note = Uracil
tccatttgtcaaaaagtaatgattt

SEQ ID NO: 3561 - DNA, 25 bp, synthetic construct
  misc_feature 1..25: note = Description of Artificial Sequence: Syntheticoligonucleotide
  misc_feature 1..25: note = Description of Combined DNA/RNA Molecule: Syntheticoligonucleotide
  source 1..25: mol_type = other DNA
  modified_base order(4,5,6,8,16,19,22,23): mod_base = OTHER; note = Uracil
ccatttgtcaaaaagtaatgatttc

SEQ ID NO: 3562 - DNA, 25 bp, synthetic construct
  misc_feature 1..25: note = Description of Artificial Sequence: Syntheticoligonucleotide
  misc_feature 1..25: note = Description of Combined DNA/RNA Molecule: Syntheticoligonucleotide
  source 1..25: mol_type = other DNA
  modified_base order(3,4,5,7,15,18,21,22,23): mod_base = OTHER; note = Uracil
catttgtcaaaaagtaatgatttct

SEQ ID NO: 3563 - DNA, 25 bp, synthetic construct
  misc_feature 1..25: note = Description of Artificial Sequence: Syntheticoligonucleotide
  misc_feature 1..25: note = Description of Combined DNA/RNA Molecule: Syntheticoligonucleotide
  source 1..25: mol_type = other DNA
  modified_base order(2,10,13,16,17,18,20,21): mod_base = OTHER; note = Uracil
gtcaaaaagtaatgatttcttgata

SEQ ID NO: 3564 - RNA, 25 nt, synthetic construct
  misc_feature 1..25: note = Description of Artificial Sequence: Syntheticoligonucleotide
  source 1..25: mol_type = other RNA
tcaaaaagtaatgatttcttgataa

SEQ ID NO: 3565 - DNA, 25 bp, synthetic construct
  misc_feature 1..25: note = Description of Artificial Sequence: Syntheticoligonucleotide
  misc_feature 1..25: note = Description of Combined DNA/RNA Molecule: Syntheticoligonucleotide
  source 1..25: mol_type = other DNA
  modified_base order(8,11,14,15,16,18,19,22): mod_base = OTHER; note = Uracil
caaaaagtaatgatttcttgataat

SEQ ID NO: 3566 - DNA, 25 bp, synthetic construct
  misc_feature 1..25: note = Description of Artificial Sequence: Syntheticoligonucleotide
  misc_feature 1..25: note = Description of Combined DNA/RNA Molecule: Syntheticoligonucleotide
  source 1..25: mol_type = other DNA
  modified_base order(7,10,13,14,15,17,18,21): mod_base = OTHER; note = Uracil
aaaaagtaatgatttcttgataatt

SEQ ID NO: 3567 - DNA, 25 bp, synthetic construct
  misc_feature 1..25: note = Description of Artificial Sequence: Syntheticoligonucleotide
  misc_feature 1..25: note = Description of Combined DNA/RNA Molecule: Syntheticoligonucleotide
  source 1..25: mol_type = other DNA
  modified_base order(5,8,11,12,13,15,16,19,22,23): mod_base = OTHER; note = Uracil
aaagtaatgatttcttgataattgt

SEQ ID NO: 3568 - DNA, 25 bp, synthetic construct
  misc_feature 1..25: note = Description of Artificial Sequence: Syntheticoligonucleotide
  misc_feature 1..25: note = Description of Combined DNA/RNA Molecule: Syntheticoligonucleotide
  source 1..25: mol_type = other DNA
  modified_base order(3,6,9,10,11,13,14,17,20,21,23): mod_base = OTHER; note = Uracil
agtaatgatttcttgataattgtgt

SEQ ID NO: 3569 - DNA, 25 bp, synthetic construct
  misc_feature 1..25: note = Description of Artificial Sequence: Syntheticoligonucleotide
  misc_feature 1..25: note = Description of Artificial Sequence: Syntheticoligonucleotide
  source 1..25: mol_type = other DNA
  modified_base order(2,5,8,9,10,12,13,16,19,20,22): mod_base = OTHER; note = Uracil
gtaatgatttcttgataattgtgta

SEQ ID NO: 3570 - DNA, 25 bp, synthetic construct
  misc_feature 1..25: note = Description of Artificial Sequence: Syntheticoligonucleotide
  misc_feature 1..25: note = Description of Combined DNA/RNA Molecule: Syntheticoligonucleotide
  source 1..25: mol_type = other DNA
  modified_base order(3,6,7,8,10,11,14,17,18,20,22): mod_base = OTHER; note = Uracil
aatgatttcttgataattgtgtagt

SEQ ID NO: 3571 - DNA, 25 bp, synthetic construct
  misc_feature 1..25: note = Description of Artificial Sequence: Syntheticoligonucleotide
  misc_feature 1..25: note = Description of Combined DNA/RNA Molecule: Syntheticoligonucleotide
  source 1..25: mol_type = other DNA
  modified_base order(2,5,6,7,9,10,13,16,17,19,21): mod_base = OTHER; note = Uracil
atgatttcttgataattgtgtagta

SEQ ID NO: 3572 - DNA, 25 bp, synthetic construct
  misc_feature 1..25: note = Description of Artificial Sequence: Syntheticoligonucleotide
  misc_feature 1..25: note = Description of Combined DNA/RNA Molecule: Syntheticoligonucleotide
  source 1..25: mol_type = other DNA
  modified_base order(1,2,4,5,8,11,12,14,16,19,22): mod_base = OTHER; note = Uracil
ttcttgataattgtgtagtaatgtt

SEQ ID NO: 3573 - DNA, 25 bp, synthetic construct
  misc_feature 1..25: note = Description of Artificial Sequence: Syntheticoligonucleotide
  misc_feature 1..25: note = Description of Combined DNA/RNA Molecule: Syntheticoligonucleotide
  source 1..25: mol_type = other DNA
  modified_base order(1,3,4,7,10,11,13,15,18,21,23): mod_base = OTHER; note = Uracil
tcttgataattgtgtagtaatgttt

SEQ ID NO: 3574 - DNA, 25 bp, synthetic construct
  misc_feature 1..25: note = Description of Artificial Sequence: Syntheticoligonucleotide
  misc_feature 1..25: note = Description of Combined DNA/RNA Molecule: Syntheticoligonucleotide
  source 1..25: mol_type = other DNA
  modified_base order(2,3,6,9,10,12,14,17,20,22,23): mod_base = OTHER; note = Uracil
cttgataattgtgtagtaatgtttt

SEQ ID NO: 3575 - DNA, 25 bp, synthetic construct
  misc_feature 1..25: note = Description of Artificial Sequence: Syntheticoligonucleotide
  misc_feature 1..25: note = Description of Combined DNA/RNA Molecule: Syntheticoligonucleotide
  source 1..25: mol_type = other DNA
  modified_base order(1,4,7,8,10,12,15,18,20,21,22,23): mod_base = OTHER; note = Uracil
tgataattgtgtagtaatgtttttt

SEQ ID NO: 3576 - RNA, 25 nt, synthetic construct
  misc_feature 1..25: note = Description of Artificial Sequence: Syntheticoligonucleotide
  source 1..25: mol_type = other RNA
taattgtgtagtaatgttttttaga

SEQ ID NO: 3577 - RNA, 25 nt, synthetic construct
  misc_feature 1..25: note = Description of Artificial Sequence: Syntheticoligonucleotide
  source 1..25: mol_type = other RNA
attgtgtagtaatgttttttagaac

SEQ ID NO: 3578 - RNA, 25 nt, synthetic construct
  misc_feature 1..25: note = Description of Artificial Sequence: Syntheticoligonucleotide
  source 1..25: mol_type = other RNA
ttgtgtagtaatgttttttagaacc

SEQ ID NO: 3579 - DNA, 25 bp, synthetic construct
  misc_feature 1..25: note = Description of Artificial Sequence: Syntheticoligonucleotide
  misc_feature 1..25: note = Description of Combined DNA/RNA Molecule: Syntheticoligonucleotide
  source 1..25: mol_type = other DNA
  modified_base order(3,4,10,14,15,16,18,20,21,22): mod_base = OTHER; note = Uracil
ccttaaagctgaatttatatttagt

SEQ ID NO: 3580 - RNA, 25 nt, synthetic construct
  misc_feature 1..25: note = Description of Artificial Sequence: Syntheticoligonucleotide
  source 1..25: mol_type = other RNA
ttaaagctgaatttatatttagtaa

SEQ ID NO: 3581 - DNA, 25 bp, synthetic construct
  misc_feature 1..25: note = Description of Artificial Sequence: Syntheticoligonucleotide
  misc_feature 1..25: note = Description of Combined DNA/RNA Molecule: Syntheticoligonucleotide
  source 1..25: mol_type = other DNA
  modified_base order(3,4,5,7,9,10,11,14,18,19,21,23): mod_base = OTHER; note = Uracil
aatttatatttagtaacttctgtgt

SEQ ID NO: 3582 - DNA, 25 bp, synthetic construct
  misc_feature 1..25: note = Description of Artificial Sequence: Syntheticoligonucleotide
  misc_feature 1..25: note = Description of Combined DNA/RNA Molecule: Syntheticoligonucleotide
  source 1..25: mol_type = other DNA
  modified_base order(2,3,4,6,8,9,10,13,17,18,20,22): mod_base = OTHER; note = Uracil
atttatatttagtaacttctgtgtt

SEQ ID NO: 3583 - DNA, 25 bp, synthetic construct
  misc_feature 1..25: note = Description of Artificial Sequence: Syntheticoligonucleotide
  misc_feature 1..25: note = Description of Combined DNA/RNA Molecule: Syntheticoligonucleotide
  source 1..25: mol_type = other DNA
  modified_base order(1,2,3,5,7,8,9,12,16,17,19,21,23): mod_base = OTHER; note = Uracil
tttatatttagtaacttctgtgtta

SEQ ID NO: 3584 - DNA, 25 bp, synthetic construct
  misc_feature 1..25: note = Description of Artificial Sequence: Syntheticoligonucleotide
  misc_feature 1..25: note = Description of Combined DNA/RNA Molecule: Syntheticoligonucleotide
  source 1..25: mol_type = other DNA
  modified_base order(2,3,4,7,11,12,14,16,18,19,22): mod_base = OTHER; note = Uracil
atttagtaacttctgtgttaatact

SEQ ID NO: 3585 - RNA, 25 nt, synthetic construct
  misc_feature 1..25: note = Description of Artificial Sequence: Syntheticoligonucleotide
  source 1..25: mol_type = other RNA
actgaatagctgtcataaaatgaaa

SEQ ID NO: 3586 - RNA, 25 nt, synthetic construct
  misc_feature 1..25: note = Description of Artificial Sequence: Syntheticoligonucleotide
  source 1..25: mol_type = other RNA
ctgaatagctgtcataaaatgaaac

SEQ ID NO: 3587 - RNA, 25 nt, synthetic construct
  misc_feature 1..25: note = Description of Artificial Sequence: Syntheticoligonucleotide
  source 1..25: mol_type = other RNA
taaaatgaaactttctttctaaaga

SEQ ID NO: 3588 - RNA, 25 nt, synthetic construct
  misc_feature 1..25: note = Description of Artificial Sequence: Syntheticoligonucleotide
  source 1..25: mol_type = other RNA
aaaatgaaactttctttctaaagaa

SEQ ID NO: 3589 - RNA, 25 nt, synthetic construct
  misc_feature 1..25: note = Description of Artificial Sequence: Syntheticoligonucleotide
  source 1..25: mol_type = other RNA
aaatgaaactttctttctaaagaaa

SEQ ID NO: 3590 - RNA, 25 nt, synthetic construct
  misc_feature 1..25: note = Description of Artificial Sequence: Syntheticoligonucleotide
  source 1..25: mol_type = other RNA
atgaaactttctttctaaagaaaga

SEQ ID NO: 3591 - DNA, 25 bp, synthetic construct
  misc_feature 1..25: note = Description of Artificial Sequence: Syntheticoligonucleotide
  misc_feature 1..25: note = Description of Combined DNA/RNA Molecule: Syntheticoligonucleotide
  source 1..25: mol_type = other DNA
  modified_base order(4,5,6,8,9,10,12,22): mod_base = OTHER; note = Uracil
aactttctttctaaagaaagatact

SEQ ID NO: 3592 - RNA, 25 nt, synthetic construct
  misc_feature 1..25: note = Description of Artificial Sequence: Syntheticoligonucleotide
  source 1..25: mol_type = other RNA
cacatgagttcttgaagaatagtca

SEQ ID NO: 3593 - DNA, 25 bp, synthetic construct
  misc_feature 1..25: note = Description of Artificial Sequence: Syntheticoligonucleotide
  misc_feature 1..25: note = Description of Combined DNA/RNA Molecule: Syntheticoligonucleotide
  source 1..25: mol_type = other DNA
  modified_base order(1,3,4,11,14,17,21): mod_base = OTHER; note = Uracil
tcttgaagaatagtcataactagat

SEQ ID NO: 3594 - DNA, 25 bp, synthetic construct
  misc_feature 1..25: note = Description of Artificial Sequence: Syntheticoligonucleotide
  misc_feature 1..25: note = Description of Combined DNA/RNA Molecule: Syntheticoligonucleotide
  source 1..25: mol_type = other DNA
  modified_base order(2,3,10,13,16,20): mod_base = OTHER; note = Uracil
cttgaagaatagtcataactagatt

SEQ ID NO: 3595 - DNA, 25 bp, synthetic construct
  misc_feature 1..25: note = Description of Artificial Sequence: Syntheticoligonucleotide
  misc_feature 1..25: note = Description of Combined DNA/RNA Molecule: Syntheticoligonucleotide
  source 1..25: mol_type = other DNA
  modified_base order(1,2,9,12,15,19,23): mod_base = OTHER; note = Uracil
ttgaagaatagtcataactagatta

SEQ ID NO: 3596 - RNA, 25 nt, synthetic construct
  misc_feature 1..25: note = Description of Artificial Sequence: Syntheticoligonucleotide
  source 1..25: mol_type = other RNA
aagaatagtcataactagattaaga

SEQ ID NO: 3597 - DNA, 25 bp, synthetic construct
  misc_feature 1..25: note = Description of Artificial Sequence: Syntheticoligonucleotide
  misc_feature 1..25: note = Description of Combined DNA/RNA Molecule: Syntheticoligonucleotide
  source 1..25: mol_type = other DNA
  modified_base order(5,8,11,15,19,20): mod_base = OTHER; note = Uracil
agaatagtcataactagattaagat

SEQ ID NO: 3598 - DNA, 25 bp, synthetic construct
  misc_feature 1..25: note = Description of Artificial Sequence: Syntheticoligonucleotide
  misc_feature 1..25: note = Description of Combined DNA/RNA Molecule: Syntheticoligonucleotide
  source 1..25: mol_type = other DNA
  modified_base order(4,7,10,14,18,19): mod_base = OTHER; note = Uracil
gaatagtcataactagattaagatc

SEQ ID NO: 3599 - DNA, 25 bp, synthetic construct
  misc_feature 1..25: note = Description of Artificial Sequence: Syntheticoligonucleotide
  misc_feature 1..25: note = Description of Combined DNA/RNA Molecule: Syntheticoligonucleotide
  source 1..25: mol_type = other DNA
  modified_base order(3,6,9,13,17,18,23): mod_base = OTHER; note = Uracil
aatagtcataactagattaagatct

SEQ ID NO: 3600 - DNA, 25 bp, synthetic construct
  misc_feature 1..25: note = Description of Artificial Sequence: Syntheticoligonucleotide
  misc_feature 1..25: note = Description of Combined DNA/RNA Molecule: Syntheticoligonucleotide
  source 1..25: mol_type = other DNA
  modified_base order(2,5,9,13,14,19,21,23): mod_base = OTHER; note = Uracil
gtcataactagattaagatctgtgt

SEQ ID NO: 3601 - DNA, 25 bp, synthetic construct
  misc_feature 1..25: note = Description of Artificial Sequence: Syntheticoligonucleotide
  misc_feature 1..25: note = Description of Combined DNA/RNA Molecule: Syntheticoligonucleotide
  source 1..25: mol_type = other DNA
  modified_base order(3,7,8,13,15,17,19,20,21,22): mod_base = OTHER; note = Uracil
  modified_base order(2,5,9,13,14,19,21,23): mod_base = OTHER; note = Uracil
gtcataactagattaagatctgtgt

SEQ ID NO: 3602 - DNA, 25 bp, synthetic construct
  misc_feature 1..25: note = Description of Artificial Sequence: Syntheticoligonucleotide
  misc_feature 1..25: note = Description of Combined DNA/RNA Molecule: Syntheticoligonucleotide
  source 1..25: mol_type = other DNA
  modified_base order(1,5,6,11,13,15,17,18,19,20,23): mod_base = OTHER; note = Uracil
tagattaagatctgtgttttagttt

SEQ ID NO: 3603 - DNA, 25 bp, synthetic construct
  misc_feature 1..25: note = Description of Artificial Sequence: Syntheticoligonucleotide
  misc_feature 1..25: note = Description of Combined DNA/RNA Molecule: Syntheticoligonucleotide
  source 1..25: mol_type = other DNA
  modified_base order(4,5,10,12,14,16,17,18,19,22,23): mod_base = OTHER; note = Uracil
agattaagatctgtgttttagttta

SEQ ID NO: 3604 - DNA, 25 bp, synthetic construct
  misc_feature 1..25: note = Description of Artificial Sequence: Syntheticoligonucleotide
  misc_feature 1..25: note = Description of Combined DNA/RNA Molecule: Syntheticoligonucleotide
  source 1..25: mol_type = other DNA
  modified_base order(2,3,8,10,12,14,15,16,17,20,21,22): mod_base = OTHER; note = Uracil
attaagatctgtgttttagtttaat

SEQ ID NO: 3605 - RNA, 25 nt, synthetic construct
  misc_feature 1..25: note = Description of Artificial Sequence: Syntheticoligonucleotide
  source 1..25: mol_type = other RNA
tctgtgttttagtttaatagtttga

SEQ ID NO: 3606 - RNA, 25 nt, synthetic construct
  misc_feature 1..25: note = Description of Artificial Sequence: Syntheticoligonucleotide
  source 1..25: mol_type = other RNA
ctgtgttttagtttaatagtttgaa

SEQ ID NO: 3607 - DNA, 25 bp, synthetic construct
  misc_feature 1..25: note = Description of Artificial Sequence: Syntheticoligonucleotide
  misc_feature 1..25: note = Description of Combined DNA/RNA Molecule: Syntheticoligonucleotide
  source 1..25: mol_type = other DNA
  modified_base order(2,4,5,6,7,10,11,12,15,18,19,20): mod_base = OTHER; note = Uracil
gtgttttagtttaatagtttgaagt

SEQ ID NO: 3608 - RNA, 25 nt, synthetic construct
  misc_feature 1..25: note = Description of Artificial Sequence: Syntheticoligonucleotide
  source 1..25: mol_type = other RNA
gttttagtttaatagtttgaagtgc

SEQ ID NO: 3609 - RNA, 25 nt, synthetic construct
  misc_feature 1..25: note = Description of Artificial Sequence: Syntheticoligonucleotide
  source 1..25: mol_type = other RNA
ttttagtttaatagtttgaagtgcc

SEQ ID NO: 3610 - DNA, 25 bp, synthetic construct
  misc_feature 1..25: note = Description of Artificial Sequence: Syntheticoligonucleotide
  misc_feature 1..25: note = Description of Combined DNA/RNA Molecule: Syntheticoligonucleotide
  source 1..25: mol_type = other DNA
  modified_base order(2,3,4,9,12,15,19,22,23): mod_base = OTHER; note = Uracil
gtttgggataatgataggtaattta

SEQ ID NO: 3611 - RNA, 25 nt, synthetic construct
  misc_feature 1..25: note = Description of Artificial Sequence: Syntheticoligonucleotide
  source 1..25: mol_type = other RNA
ttgggataatgataggtaatttaga

SEQ ID NO: 3612 - RNA, 25 nt, synthetic construct
  misc_feature 1..25: note = Description of Artificial Sequence: Syntheticoligonucleotide
  source 1..25: mol_type = other RNA
ggataatgataggtaatttagatga

SEQ ID NO: 3613 - RNA, 25 nt, synthetic construct
  misc_feature 1..25: note = Description of Artificial Sequence: Syntheticoligonucleotide
  source 1..25: mol_type = other RNA
gataatgataggtaatttagatgaa

SEQ ID NO: 3614 - DNA, 25 bp, synthetic construct
  misc_feature 1..25: note = Description of Artificial Sequence: Syntheticoligonucleotide
  misc_feature 1..25: note = Description of Combined DNA/RNA Molecule: Syntheticoligonucleotide
  source 1..25: mol_type = other DNA
  modified_base order(3,6,10,13,14,15,19,23): mod_base = OTHER; note = Uracil
aatgataggtaatttagatgaattt

SEQ ID NO: 3615 - DNA, 25 bp, synthetic construct
  misc_feature 1..25: note = Description of Artificial Sequence: Syntheticoligonucleotide
  misc_feature 1..25: note = Description of Combined DNA/RNA Molecule: Syntheticoligonucleotide
  source 1..25: mol_type = other DNA
  modified_base order(2,5,9,12,13,14,18,22,23): mod_base = OTHER; note = Uracil
atgataggtaatttagatgaattta

SEQ ID NO: 3616 - RNA, 25 nt, synthetic construct
  misc_feature 1..25: note = Description of Artificial Sequence: Syntheticoligonucleotide
  source 1..25: mol_type = other RNA
aggtaatttagatgaatttagggga

SEQ ID NO: 3617 - RNA, 25 nt, synthetic construct
  misc_feature 1..25: note = Description of Artificial Sequence: Syntheticoligonucleotide
  source 1..25: mol_type = other RNA
gtaatttagatgaatttaggggaaa

SEQ ID NO: 3618 - DNA, 25 bp, synthetic construct
  misc_feature 1..25: note = Description of Artificial Sequence: Syntheticoligonucleotide
  misc_feature 1..25: note = Description of Combined DNA/RNA Molecule: Syntheticoligonucleotide
  source 1..25: mol_type = other DNA
  modified_base order(4,8,9,10): mod_base = OTHER; note = Uracil
agatgaatttaggggaaaaaaaagt

SEQ ID NO: 3619 - DNA, 25 bp, synthetic construct
  misc_feature 1..25: note = Description of Artificial Sequence: Syntheticoligonucleotide
  misc_feature 1..25: note = Description of Combined DNA/RNA Molecule: Syntheticoligonucleotide
  source 1..25: mol_type = other DNA
  modified_base order(3,7,8,9): mod_base = OTHER; note = Uracil
gatgaatttaggggaaaaaaaagtt

SEQ ID NO: 3620 - DNA, 25 bp, synthetic construct
  misc_feature 1..25: note = Description of Artificial Sequence: Syntheticoligonucleotide
  misc_feature 1..25: note = Description of Combined DNA/RNA Molecule: Syntheticoligonucleotide
  source 1..25: mol_type = other DNA
  modified_base order(13,14,16,18): mod_base = OTHER; note = Uracil
gggaaaaaaaagttatctgcagata

SEQ ID NO: 3621 - DNA, 25 bp, synthetic construct
  misc_feature 1..25: note = Description of Artificial Sequence: Syntheticoligonucleotide
  misc_feature 1..25: note = Description of Combined DNA/RNA Molecule: Syntheticoligonucleotide
  source 1..25: mol_type = other DNA
  modified_base order(12,13,15,17,23): mod_base = OTHER; note = Uracil
ggaaaaaaaagttatctgcagatat

SEQ ID NO: 3622 - RNA, 25 nt, synthetic construct
  misc_feature 1..25: note = Description of Artificial Sequence: Syntheticoligonucleotide
  source 1..25: mol_type = other RNA
aaaaagttatctgcagatatgttga

SEQ ID NO: 3623 - DNA, 25 bp, synthetic construct
  misc_feature 1..25: note = Description of Artificial Sequence: Syntheticoligonucleotide
  misc_feature 1..25: note = Description of Combined DNA/RNA Molecule: Syntheticoligonucleotide
  source 1..25: mol_type = other DNA
  modified_base order(2,4,5,7,9,10,11,12,15,17,18): mod_base = OTHER; note = Uracil
gtcttgtgttttcatgttgaaaata

SEQ ID NO: 3624 - RNA, 25 nt, synthetic construct
  misc_feature 1..25: note = Description of Artificial Sequence: Syntheticoligonucleotide
  source 1..25: mol_type = other RNA
tcttgtgttttcatgttgaaaatac

SEQ ID NO: 3625 - DNA, 25 bp, synthetic construct
  misc_feature 1..25: note = Description of Artificial Sequence: Syntheticoligonucleotide
  misc_feature 1..25: note = Description of Combined DNA/RNA Molecule: Syntheticoligonucleotide
  source 1..25: mol_type = other DNA
  modified_base order(2,3,5,7,8,9,10,13,15,16,22): mod_base = OTHER; note = Uracil
cttgtgttttcatgttgaaaatact

SEQ ID NO: 3626 - DNA, 25 bp, synthetic construct
  misc_feature 1..25: note = Description of Artificial Sequence: Syntheticoligonucleotide
  misc_feature 1..25: note = Description of Combined DNA/RNA Molecule: Syntheticoligonucleotide
  source 1..25: mol_type = other DNA
  modified_base order(3,5,6,12,15,16,17,18,22,23): mod_base = OTHER; note = Uracil
catgttgaaaatacttttgcatttt

SEQ ID NO: 3627 - DNA, 25 bp, synthetic construct
  misc_feature 1..25: note = Description of Artificial Sequence: Syntheticoligonucleotide
  misc_feature 1..25: note = Description of Combined DNA/RNA Molecule: Syntheticoligonucleotide
  source 1..25: mol_type = other DNA
  modified_base order(2,4,5,11,14,15,16,17,21,22,23): mod_base = OTHER; note = Uracil
atgttgaaaatacttttgcattttt

SEQ ID NO: 3628 - DNA, 25 bp, synthetic construct
  misc_feature 1..25: note = Description of Artificial Sequence: Syntheticoligonucleotide
  misc_feature 1..25: note = Description of Combined DNA/RNA Molecule: Syntheticoligonucleotide
  source 1..25: mol_type = other DNA
  modified_base order(1,3,4,10,13,14,15,16,20,21,22,23): mod_base = OTHER; note = Uracil
tgttgaaaatacttttgcatttttc

SEQ ID NO: 3629 - RNA, 25 nt, synthetic construct
  misc_feature 1..25: note = Description of Artificial Sequence: Syntheticoligonucleotide
  source 1..25: mol_type = other RNA
gttgaaaatacttttgcatttttcc

SEQ ID NO: 3630 - RNA, 25 nt, synthetic construct
  misc_feature 1..25: note = Description of Artificial Sequence: Syntheticoligonucleotide
  source 1..25: mol_type = other RNA
cttttgcatttttcctttgagtgcc

SEQ ID NO: 3631 - DNA, 25 bp, synthetic construct
  misc_feature 1..25: note = Description of Artificial Sequence: Syntheticoligonucleotide
  misc_feature 1..25: note = Description of Combined DNA/RNA Molecule: Syntheticoligonucleotide
  source 1..25: mol_type = other DNA
  modified_base order(1,5,11,12,13,15,16,19,22): mod_base = OTHER; note = Uracil
tgagtgccaatttcttactagtact

SEQ ID NO: 3632 - DNA, 25 bp, synthetic construct
  misc_feature 1..25: note = Description of Artificial Sequence: Syntheticoligonucleotide
  misc_feature 1..25: note = Description of Combined DNA/RNA Molecule: Syntheticoligonucleotide
  source 1..25: mol_type = other DNA
  modified_base order(6,7,8,10,11,14,17,20,22,23): mod_base = OTHER; note = Uracil
gccaatttcttactagtactatttc

SEQ ID NO: 3633 - DNA, 25 bp, synthetic construct
  misc_feature 1..25: note = Description of Artificial Sequence: Syntheticoligonucleotide
  misc_feature 1..25: note = Description of Combined DNA/RNA Molecule: Syntheticoligonucleotide
  source 1..25: mol_type = other DNA
  modified_base order(5,6,7,9,10,13,16,19,21,22,23): mod_base = OTHER; note = Uracil
ccaatttcttactagtactatttct

SEQ ID NO: 3634 - RNA, 25 nt, synthetic construct
  misc_feature 1..25: note = Description of Artificial Sequence: Syntheticoligonucleotide
  source 1..25: mol_type = other RNA
tactagtactatttcttaatgtaac

SEQ ID NO: 3635 - RNA, 25 nt, synthetic construct
  misc_feature 1..25: note = Description of Artificial Sequence: Syntheticoligonucleotide
  source 1..25: mol_type = other RNA
actagtactatttcttaatgtaaca

SEQ ID NO: 3636 - DNA, 25 bp, synthetic construct
  misc_feature 1..25: note = Description of Artificial Sequence: Syntheticoligonucleotide
  misc_feature 1..25: note = Description of Combined DNA/RNA Molecule: Syntheticoligonucleotide
  source 1..25: mol_type = other DNA
  modified_base order(1,4,6,7,8,10,11,14,16,21,23): mod_base = OTHER; note = Uracil
tactatttcttaatgtaacatgttt

SEQ ID NO: 3637 - DNA, 25 bp, synthetic construct
  misc_feature 1..25: note = Description of Artificial Sequence: Syntheticoligonucleotide
  misc_feature 1..25: note = Description of Combined DNA/RNA Molecule: Syntheticoligonucleotide
  source 1..25: mol_type = other DNA
  modified_base order(3,5,6,7,9,10,13,15,20,22,23): mod_base = OTHER; note = Uracil
actatttcttaatgtaacatgttta

SEQ ID NO: 3638 - RNA, 25 nt, synthetic construct
  misc_feature 1..25: note = Description of Artificial Sequence: Syntheticoligonucleotide
  source 1..25: mol_type = other RNA
ctatttcttaatgtaacatgtttac

SEQ ID NO: 3639 - DNA, 25 bp, synthetic construct
  misc_feature 1..25: note = Description of Artificial Sequence: Syntheticoligonucleotide
  misc_feature 1..25: note = Description of Combined DNA/RNA Molecule: Syntheticoligonucleotide
  source 1..25: mol_type = other DNA
  modified_base order(1,2,5,7,12,14,15,16,20): mod_base = OTHER; note = Uracil
ttaatgtaacatgtttacctggaat

SEQ ID NO: 3640 - DNA, 25 bp, synthetic construct
  misc_feature 1..25: note = Description of Artificial Sequence: Syntheticoligonucleotide
  misc_feature 1..25: note = Description of Combined DNA/RNA Molecule: Syntheticoligonucleotide
  source 1..25: mol_type = other DNA
  modified_base order(3,8,10,12,13,14,15,19,21,22,23): mod_base = OTHER; note = Uracil
cctggaatgtattttaactattttt

SEQ ID NO: 3641 - DNA, 25 bp, synthetic construct
  misc_feature 1..25: note = Description of Artificial Sequence: Syntheticoligonucleotide
  misc_feature 1..25: note = Description of Combined DNA/RNA Molecule: Syntheticoligonucleotide
  source 1..25: mol_type = other DNA
  modified_base order(1,6,8,10,11,12,13,17,19,20,21,22,23): mod_base = OTHER; note = Uracil
tggaatgtattttaactatttttgt

SEQ ID NO: 3642 - DNA, 25 bp, synthetic construct
  misc_feature 1..25: note = Description of Artificial Sequence: Syntheticoligonucleotide
  misc_feature 1..25: note = Description of Combined DNA/RNA Molecule: Syntheticoligonucleotide
  source 1..25: mol_type = other DNA
  modified_base order(5,7,9,10,11,12,16,18,19,20,21,22): mod_base = OTHER; note = Uracil
ggaatgtattttaactatttttgta

SEQ ID NO: 3643 - DNA, 25 bp, synthetic construct
  misc_feature 1..25: note = Description of Artificial Sequence: Syntheticoligonucleotide
  misc_feature 1..25: note = Description of Combined DNA/RNA Molecule: Syntheticoligonucleotide
  source 1..25: mol_type = other DNA
  modified_base order(4,6,8,9,10,11,15,17,18,19,20,21,23): mod_base = OTHER; note = Uracil
gaatgtattttaactatttttgtat

SEQ ID NO: 3644 - DNA, 25 bp, synthetic construct
  misc_feature 1..25: note = Description of Artificial Sequence: Syntheticoligonucleotide
  misc_feature 1..25: note = Description of Combined DNA/RNA Molecule: Syntheticoligonucleotide
  source 1..25: mol_type = other DNA
  modified_base order(3,5,7,8,9,10,14,16,17,18,19,20,22): mod_base = OTHER; note = Uracil
aatgtattttaactatttttgtata

SEQ ID NO: 3645 - DNA, 25 bp, synthetic construct
  misc_feature 1..25: note = Description of Artificial Sequence: Syntheticoligonucleotide
  misc_feature 1..25: note = Description of Combined DNA/RNA Molecule: Syntheticoligonucleotide
  source 1..25: mol_type = other DNA
  modified_base order(1,3,5,6,7,8,12,14,15,16,17,18,20,22): mod_base = OTHER; note = Uracil
tgtattttaactatttttgtatagt

SEQ ID NO: 3646 - DNA, 25 bp, synthetic construct
  misc_feature 1..25: note = Description of Artificial Sequence: Syntheticoligonucleotide
  misc_feature 1..25: note = Description of Combined DNA/RNA Molecule: Syntheticoligonucleotide
  source 1..25: mol_type = other DNA
  modified_base order(1,3,4,5,6,10,12,13,14,15,16,18,20,23): mod_base = OTHER; note = Uracil
tattttaactatttttgtatagtgt

SEQ ID NO: 3647 - DNA, 25 bp, synthetic construct
  misc_feature 1..25: note = Description of Artificial Sequence: Syntheticoligonucleotide
  misc_feature 1..25: note = Description of Combined DNA/RNA Molecule: Syntheticoligonucleotide
  source 1..25: mol_type = other DNA
  modified_base order(2,3,4,5,9,11,12,13,14,15,17,19,22): mod_base = OTHER; note = Uracil
attttaactatttttgtatagtgta

SEQ ID NO: 3648 - RNA, 25 nt, synthetic construct
  misc_feature 1..25: note = Description of Artificial Sequence: Syntheticoligonucleotide
  source 1..25: mol_type = other RNA
ttttaactatttttgtatagtgtaa

SEQ ID NO: 3649 - RNA, 25 nt, synthetic construct
  misc_feature 1..25: note = Description of Artificial Sequence: Syntheticoligonucleotide
  source 1..25: mol_type = other RNA
tatttttgtatagtgtaaactgaaa

SEQ ID NO: 3650 - RNA, 25 nt, synthetic construct
  misc_feature 1..25: note = Description of Artificial Sequence: Syntheticoligonucleotide
  source 1..25: mol_type = other RNA
atttttgtatagtgtaaactgaaac

SEQ ID NO: 3651 - RNA, 25 nt, synthetic construct
  misc_feature 1..25: note = Description of Artificial Sequence: Syntheticoligonucleotide
  source 1..25: mol_type = other RNA
tttttgtatagtgtaaactgaaaca

SEQ ID NO: 3652 - RNA, 25 nt, synthetic construct
  misc_feature 1..25: note = Description of Artificial Sequence: Syntheticoligonucleotide
  source 1..25: mol_type = other RNA
aactgaaacatgcacattttgtaca

SEQ ID NO: 3653 - RNA, 25 nt, synthetic construct
  misc_feature 1..25: note = Description of Artificial Sequence: Syntheticoligonucleotide
  source 1..25: mol_type = other RNA
aacatgcacattttgtacattgtgc

SEQ ID NO: 3654 - DNA, 25 bp, synthetic construct
  misc_feature 1..25: note = Description of Artificial Sequence: Syntheticoligonucleotide
  misc_feature 1..25: note = Description of Combined DNA/RNA Molecule: Syntheticoligonucleotide
  source 1..25: mol_type = other DNA
  modified_base order(1,6,7,9,10,11,12,16,19,20,21): mod_base = OTHER; note = Uracil
tccagttgttttccatcatttggtt

SEQ ID NO: 3655 - RNA, 25 nt, synthetic construct
  misc_feature 1..25: note = Description of Artificial Sequence: Syntheticoligonucleotide
  source 1..25: mol_type = other RNA
cagttgttttccatcatttggttgc

SEQ ID NO: 3656 - RNA, 25 nt, synthetic construct
  misc_feature 1..25: note = Description of Artificial Sequence: Syntheticoligonucleotide
  source 1..25: mol_type = other RNA
atgttggtcatatcaaacattaaaa

SEQ ID NO: 3657 - RNA, 25 nt, synthetic construct
  misc_feature 1..25: note = Description of Artificial Sequence: Syntheticoligonucleotide
  source 1..25: mol_type = other RNA
tgttggtcatatcaaacattaaaaa

SEQ ID NO: 3658 - DNA, 25 bp, synthetic construct
  misc_feature 1..25: note = Description of Artificial Sequence: Syntheticoligonucleotide
  misc_feature 1..25: note = Description of Combined DNA/RNA Molecule: Syntheticoligonucleotide
  source 1..25: mol_type = other DNA
  modified_base order(2,3,6,9,11,18,19): mod_base = OTHER; note = Uracil
gttggtcatatcaaacattaaaaat

SEQ ID NO: 3659 - RNA, 25 nt, synthetic construct
  misc_feature 1..25: note = Description of Artificial Sequence: Syntheticoligonucleotide
  source 1..25: mol_type = other RNA
gtcatatcaaacattaaaaatgacc

SEQ ID NO: 3660 - RNA, 25 nt, synthetic construct
  misc_feature 1..25: note = Description of Artificial Sequence: Syntheticoligonucleotide
  source 1..25: mol_type = other RNA
aaaatgaccactcttttaattgaaa

SEQ ID NO: 3661 - DNA, 25 bp, synthetic construct
  misc_feature 1..25: note = Description of Artificial Sequence: Syntheticoligonucleotide
  misc_feature 1..25: note = Description of Combined DNA/RNA Molecule: Syntheticoligonucleotide
  source 1..25: mol_type = other DNA
  modified_base order(4,11,13,14,15,16,19,20): mod_base = OTHER; note = Uracil
aaatgaccactcttttaattgaaat

SEQ ID NO: 3662 - DNA, 25 bp, synthetic construct
  misc_feature 1..25: note = Description of Artificial Sequence: Syntheticoligonucleotide
  misc_feature 1..25: note = Description of Combined DNA/RNA Molecule: Syntheticoligonucleotide
  source 1..25: mol_type = other DNA
  modified_base order(2,4,5,6,7,10,11,16,17,21,22,23): mod_base = OTHER; note = Uracil
ctcttttaattgaaattaactttta

SEQ ID NO: 3663 - RNA, 25 nt, synthetic construct
  misc_feature 1..25: note = Description of Artificial Sequence: Syntheticoligonucleotide
  source 1..25: mol_type = other RNA
tcttttaattgaaattaacttttaa

SEQ ID NO: 3664 - DNA, 25 bp, synthetic construct
  misc_feature 1..25: note = Description of Artificial Sequence: Syntheticoligonucleotide
  misc_feature 1..25: note = Description of Combined DNA/RNA Molecule: Syntheticoligonucleotide
  source 1..25: mol_type = other DNA
  modified_base order(1,2,3,4,7,8,13,14,18,19,20,21): mod_base = OTHER; note = Uracil
ttttaattgaaattaacttttaaat

SEQ ID NO: 3665 - DNA, 25 bp, synthetic construct
  misc_feature 1..25: note = Description of Artificial Sequence: Syntheticoligonucleotide
  misc_feature 1..25: note = Description of Combined DNA/RNA Molecule: Syntheticoligonucleotide
  source 1..25: mol_type = other DNA
  modified_base order(1,2,5,6,11,12,16,17,18,19,23): mod_base = OTHER; note = Uracil
ttaattgaaattaacttttaaatgt

SEQ ID NO: 3666 - DNA, 25 bp, synthetic construct
  misc_feature 1..25: note = Description of Artificial Sequence: Syntheticoligonucleotide
  misc_feature 1..25: note = Description of Combined DNA/RNA Molecule: Syntheticoligonucleotide
  source 1..25: mol_type = other DNA
  modified_base order(1,4,5,10,11,15,16,17,18,22): mod_base = OTHER; note = Uracil
taattgaaattaacttttaaatgtt

SEQ ID NO: 3667 - DNA, 25 bp, synthetic construct
  misc_feature 1..25: note = Description of Artificial Sequence: Syntheticoligonucleotide
  misc_feature 1..25: note = Description of Combined DNA/RNA Molecule: Syntheticoligonucleotide
  source 1..25: mol_type = other DNA
  modified_base order(3,4,9,10,14,15,16,17,21,23): mod_base = OTHER; note = Uracil
aattgaaattaacttttaaatgttt

SEQ ID NO: 3668 - DNA, 25 bp, synthetic construct
  misc_feature 1..25: note = Description of Artificial Sequence: Syntheticoligonucleotide
  misc_feature 1..25: note = Description of Combined DNA/RNA Molecule: Syntheticoligonucleotide
  source 1..25: mol_type = other DNA
  modified_base order(2,3,8,9,13,14,15,16,20,22,23): mod_base = OTHER; note = Uracil
attgaaattaacttttaaatgttta

SEQ ID NO: 3669 - DNA, 25 bp, synthetic construct
  misc_feature 1..25: note = Description of Artificial Sequence: Syntheticoligonucleotide
  misc_feature 1..25: note = Description of Combined DNA/RNA Molecule: Syntheticoligonucleotide
  source 1..25: mol_type = other DNA
  modified_base order(1,2,7,8,12,13,14,15,19,21,22,23): mod_base = OTHER; note = Uracil
ttgaaattaacttttaaatgtttat

SEQ ID NO: 3670 - DNA, 25 bp, synthetic construct
  misc_feature 1..25: note = Description of Artificial Sequence: Syntheticoligonucleotide
  misc_feature 1..25: note = Description of Combined DNA/RNA Molecule: Syntheticoligonucleotide
  source 1..25: mol_type = other DNA
  modified_base order(1,6,7,11,12,13,14,18,20,21,22): mod_base = OTHER; note = Uracil
tgaaattaacttttaaatgtttata

SEQ ID NO: 3671 - RNA, 25 nt, synthetic construct
  misc_feature 1..25: note = Description of Artificial Sequence: Syntheticoligonucleotide
  source 1..25: mol_type = other RNA
aattaacttttaaatgtttatagga

SEQ ID NO: 3672 - DNA, 25 bp, synthetic construct
  misc_feature 1..25: note = Description of Artificial Sequence: Syntheticoligonucleotide
  misc_feature 1..25: note = Description of Combined DNA/RNA Molecule: Syntheticoligonucleotide
  source 1..25: mol_type = other DNA
  modified_base order(4,5,6,7,11,13,14,15,17,23): mod_base = OTHER; note = Uracil
aacttttaaatgtttataggagtat

SEQ ID NO: 3673 - RNA, 25 nt, synthetic construct
  misc_feature 1..25: note = Description of Artificial Sequence: Syntheticoligonucleotide
  source 1..25: mol_type = other RNA
tttaaatgtttataggagtatgtgc

SEQ ID NO: 3674 - DNA, 25 bp, synthetic construct
  misc_feature 1..25: note = Description of Artificial Sequence: Syntheticoligonucleotide
  misc_feature 1..25: note = Description of Combined DNA/RNA Molecule: Syntheticoligonucleotide
  source 1..25: mol_type = other DNA
  modified_base order(1,2,6,8,9,10,12,18,20,22): mod_base = OTHER; note = Uracil
ttaaatgtttataggagtatgtgct

SEQ ID NO: 3675 - DNA, 25 bp, synthetic construct
  misc_feature 1..25: note = Description of Artificial Sequence: Syntheticoligonucleotide
  misc_feature 1..25: note = Description of Combined DNA/RNA Molecule: Syntheticoligonucleotide
  source 1..25: mol_type = other DNA
  modified_base order(3,5,10,13,15,20,21,22): mod_base = OTHER; note = Uracil
gctgtgaagtgatctaaaatttgta

SEQ ID NO: 3676 - DNA, 25 bp, synthetic construct
  misc_feature 1..25: note = Description of Artificial Sequence: Syntheticoligonucleotide
  misc_feature 1..25: note = Description of Combined DNA/RNA Molecule: Syntheticoligonucleotide
  source 1..25: mol_type = other DNA
  modified_base order(1,3,8,11,13,18,19,20,22): mod_base = OTHER; note = Uracil
tgtgaagtgatctaaaatttgtaat

SEQ ID NO: 3677 - DNA, 25 bp, synthetic construct
  misc_feature 1..25: note = Description of Artificial Sequence: Syntheticoligonucleotide
  misc_feature 1..25: note = Description of Combined DNA/RNA Molecule: Syntheticoligonucleotide
  source 1..25: mol_type = other DNA
  modified_base order(2,7,10,12,17,18,19,21): mod_base = OTHER; note = Uracil
gtgaagtgatctaaaatttgtaata

SEQ ID NO: 3678 - DNA, 25 bp, synthetic construct
  misc_feature 1..25: note = Description of Artificial Sequence: Syntheticoligonucleotide
  misc_feature 1..25: note = Description of Combined DNA/RNA Molecule: Syntheticoligonucleotide
  source 1..25: mol_type = other DNA
  modified_base order(1,6,9,11,16,17,18,20,23): mod_base = OTHER; note = Uracil
tgaagtgatctaaaatttgtaatat

SEQ ID NO: 3679 - DNA, 25 bp, synthetic construct
  misc_feature 1..25: note = Description of Artificial Sequence: Syntheticoligonucleotide
  misc_feature 1..25: note = Description of Combined DNA/RNA Molecule: Syntheticoligonucleotide
  source 1..25: mol_type = other DNA
  modified_base order(5,8,10,15,16,17,19,22): mod_base = OTHER; note = Uracil
gaagtgatctaaaatttgtaatatt

SEQ ID NO: 3680 - DNA, 25 bp, synthetic construct
  misc_feature 1..25: note = Description of Artificial Sequence: Syntheticoligonucleotide
  misc_feature 1..25: note = Description of Combined DNA/RNA Molecule: Syntheticoligonucleotide
  source 1..25: mol_type = other DNA
  modified_base order(4,7,9,14,15,16,18,21,23): mod_base = OTHER; note = Uracil
aagtgatctaaaatttgtaatattt

SEQ ID NO: 3681 - DNA, 25 bp, synthetic construct
  misc_feature 1..25: note = Description of Artificial Sequence: Syntheticoligonucleotide
  misc_feature 1..25: note = Description of Combined DNA/RNA Molecule: Syntheticoligonucleotide
  source 1..25: mol_type = other DNA
  modified_base order(3,6,8,13,14,15,17,20,22,23): mod_base = OTHER; note = Uracil
agtgatctaaaatttgtaatatttt

SEQ ID NO: 3682 - DNA, 25 bp, synthetic construct
  misc_feature 1..25: note = Description of Artificial Sequence: Syntheticoligonucleotide
  misc_feature 1..25: note = Description of Combined DNA/RNA Molecule: Syntheticoligonucleotide
  source 1..25: mol_type = other DNA
  modified_base order(2,4,9,10,11,13,16,18,19,20,21,22): mod_base = OTHER; note = Uracil
atctaaaatttgtaatatttttgtc

SEQ ID NO: 3683 - RNA, 25 nt, synthetic construct
  misc_feature 1..25: note = Description of Artificial Sequence: Syntheticoligonucleotide
  source 1..25: mol_type = other RNA
tctaaaatttgtaatatttttgtca

SEQ ID NO: 3684 - RNA, 25 nt, synthetic construct
  misc_feature 1..25: note = Description of Artificial Sequence: Syntheticoligonucleotide
  source 1..25: mol_type = other RNA
aaatttgtaatatttttgtcatgaa

SEQ ID NO: 3685 - RNA, 25 nt, synthetic construct
  misc_feature 1..25: note = Description of Artificial Sequence: Syntheticoligonucleotide
  source 1..25: mol_type = other RNA
aatttgtaatatttttgtcatgaac

SEQ ID NO: 3686 - DNA, 25 bp, synthetic construct
  misc_feature 1..25: note = Description of Artificial Sequence: Syntheticoligonucleotide
  misc_feature 1..25: note = Description of Combined DNA/RNA Molecule: Syntheticoligonucleotide
  source 1..25: mol_type = other DNA
  modified_base order(2,3,4,6,9,11,12,13,14,15,17,20): mod_base = OTHER; note = Uracil
atttgtaatatttttgtcatgaact

SEQ ID NO: 3687 - RNA, 25 nt, synthetic construct
  misc_feature 1..25: note = Description of Artificial Sequence: Syntheticoligonucleotide
  source 1..25: mol_type = other RNA
gtaatatttttgtcatgaactgtac

SEQ ID NO: 3688 - DNA, 25 bp, synthetic construct
  misc_feature 1..25: note = Description of Artificial Sequence: Syntheticoligonucleotide
  misc_feature 1..25: note = Description of Combined DNA/RNA Molecule: Syntheticoligonucleotide
  source 1..25: mol_type = other DNA
  modified_base order(1,4,6,7,8,9,10,12,15,20,22): mod_base = OTHER; note = Uracil
taatatttttgtcatgaactgtact

SEQ ID NO: 3689 - DNA, 25 bp, synthetic construct
  misc_feature 1..25: note = Description of Artificial Sequence: Syntheticoligonucleotide
  misc_feature 1..25: note = Description of Combined DNA/RNA Molecule: Syntheticoligonucleotide
  source 1..25: mol_type = other DNA
  modified_base order(4,6,9,12,15,18,19,21,22): mod_base = OTHER; note = Uracil
aactgtactactcctaattattgta

SEQ ID NO: 3690 - RNA, 25 nt, synthetic construct
  misc_feature 1..25: note = Description of Artificial Sequence: Syntheticoligonucleotide
  source 1..25: mol_type = other RNA
actgtactactcctaattattgtaa

SEQ ID NO: 3691 - RNA, 25 nt, synthetic construct
  misc_feature 1..25: note = Description of Artificial Sequence: Syntheticoligonucleotide
  source 1..25: mol_type = other RNA
tcctaattattgtaatgtaataaaa

SEQ ID NO: 3692 - RNA, 25 nt, synthetic construct
  misc_feature 1..25: note = Description of Artificial Sequence: Syntheticoligonucleotide
  source 1..25: mol_type = other RNA
  modified_base order(1,4,5,7,8,10,13,15,18): mod_base = OTHER; note = Uracil
taattattgtaatgtaataaaaata

SEQ ID NO: 3693 - DNA, 25 bp, synthetic construct
  misc_feature 1..25: note = Description of Artificial Sequence: Syntheticoligonucleotide
  misc_feature 1..25: note = Description of Combined DNA/RNA Molecule: Syntheticoligonucleotide
  source 1..25: mol_type = other DNA
  modified_base order(1,4,5,7,8,10,13,15,18): mod_base = OTHER; note = Uracil
taattattgtaatgtaataaaaata

SEQ ID NO: 3694 - DNA, 25 bp, synthetic construct
  misc_feature 1..25: note = Description of Artificial Sequence: Syntheticoligonucleotide
  misc_feature 1..25: note = Description of Combined DNA/RNA Molecule: Syntheticoligonucleotide
  source 1..25: mol_type = other DNA
  modified_base order(2,3,5,6,8,11,13,16,22): mod_base = OTHER; note = Uracil
attattgtaatgtaataaaaatagt

SEQ ID NO: 3695 - DNA, 25 bp, synthetic construct
  misc_feature 1..25: note = Description of Artificial Sequence: Syntheticoligonucleotide
  misc_feature 1..25: note = Description of Combined DNA/RNA Molecule: Syntheticoligonucleotide
  source 1..25: mol_type = other DNA
  modified_base order(1,2,4,5,7,10,12,15,21): mod_base = OTHER; note = Uracil
ttattgtaatgtaataaaaatagtt

SEQ ID NO: 3696 - RNA, 25 nt, synthetic construct
  misc_feature 1..25: note = Description of Artificial Sequence: Syntheticoligonucleotide
  source 1..25: mol_type = other RNA
attgtaatgtaataaaaatagttac

SEQ ID NO: 3697 - RNA, 25 nt, synthetic construct
  misc_feature 1..25: note = Description of Artificial Sequence: Syntheticoligonucleotide
  source 1..25: mol_type = other RNA
ttgtaatgtaataaaaatagttaca

SEQ ID NO: 3698 - RNA, 25 nt, synthetic construct
  misc_feature 1..25: note = Description of Artificial Sequence: Syntheticoligonucleotide
  source 1..25: mol_type = other RNA
aatgtaataaaaatagttacagtga

SEQ ID NO: 3699 - RNA, 25 nt, synthetic construct
  misc_feature 1..25: note = Description of Artificial Sequence: Syntheticoligonucleotide
  source 1..25: mol_type = other RNA
atgtaataaaaatagttacagtgac

SEQ ID NO: 3700 - RNA, 25 nt, synthetic construct
  misc_feature 1..25: note = Description of Artificial Sequence: Syntheticoligonucleotide
  source 1..25: mol_type = other RNA
tgtaataaaaatagttacagtgaca

SEQ ID NO: 3701 - RNA, 25 nt, synthetic construct
  misc_feature 1..25: note = Description of Artificial Sequence: Syntheticoligonucleotide
  source 1..25: mol_type = other RNA
aaatagttacagtgacaaaaaaaaa

SEQ ID NO: 3702 - RNA, 25 nt, synthetic construct
  misc_feature 1..25: note = Description of Artificial Sequence: Syntheticoligonucleotide
  source 1..25: mol_type = other RNA
aatagttacagtgacaaaaaaaaaa

SEQ ID NO: 3703 - RNA, 25 nt, synthetic construct
  misc_feature 1..25: note = Description of Artificial Sequence: Syntheticoligonucleotide
  source 1..25: mol_type = other RNA
tagttacagtgacaaaaaaaaaaaa

SEQ ID NO: 3704 - DNA, 27 bp, Homo sapiens
  source 1..27: mol_type = other DNA
cctgctgaaaatgactgaatataaact

SEQ ID NO: 3705 - DNA, 27 bp, Homo sapiens
  source 1..27: mol_type = other DNA
gaaaatgactgaatataaacttgtggt

SEQ ID NO: 3706 - DNA, 27 bp, Homo sapiens
  source 1..27: mol_type = other DNA
atgactgaatataaacttgtggtagtt

SEQ ID NO: 3707 - DNA, 27 bp, Homo sapiens
  source 1..27: mol_type = other DNA
acagctaattcagaatcattttgtgga

SEQ ID NO: 3708 - DNA, 27 bp, Homo sapiens
  source 1..27: mol_type = other DNA
ggacgaatatgatccaacaatagagga

SEQ ID NO: 3709 - DNA, 27 bp, Homo sapiens
  source 1..27: mol_type = other DNA
gaagcaagtagtaattgatggagaaac

SEQ ID NO: 3710 - DNA, 27 bp, Homo sapiens
  source 1..27: mol_type = other DNA
ggggagggctttctttgtgtatttgcc

SEQ ID NO: 3711 - DNA, 27 bp, Homo sapiens
  source 1..27: mol_type = other DNA
tttctttgtgtatttgccataaataat

SEQ ID NO: 3712 - DNA, 27 bp, Homo sapiens
  source 1..27: mol_type = other DNA
ttctttgtgtatttgccataaataata

SEQ ID NO: 3713 - DNA, 27 bp, Homo sapiens
  source 1..27: mol_type = other DNA
tctttgtgtatttgccataaataatac

SEQ ID NO: 3714 - DNA, 27 bp, Homo sapiens
  source 1..27: mol_type = other DNA
ctttgtgtatttgccataaataatact

SEQ ID NO: 3715 - DNA, 27 bp, Homo sapiens
  source 1..27: mol_type = other DNA
gtgtatttgccataaataatactaaat

SEQ ID NO: 3716 - DNA, 27 bp, Homo sapiens
  source 1..27: mol_type = other DNA
tgtatttgccataaataatactaaatc

SEQ ID NO: 3717 - DNA, 27 bp, Homo sapiens
  source 1..27: mol_type = other DNA
tgccataaataatactaaatcatttga

SEQ ID NO: 3718 - DNA, 27 bp, Homo sapiens
  source 1..27: mol_type = other DNA
gccataaataatactaaatcatttgaa

SEQ ID NO: 3719 - DNA, 27 bp, Homo sapiens
  source 1..27: mol_type = other DNA
cataaataatactaaatcatttgaaga

SEQ ID NO: 3720 - DNA, 27 bp, Homo sapiens
  source 1..27: mol_type = other DNA
ataaataatactaaatcatttgaagat

SEQ ID NO: 3721 - DNA, 27 bp, Homo sapiens
  source 1..27: mol_type = other DNA
taaataatactaaatcatttgaagata

SEQ ID NO: 3722 - DNA, 27 bp, Homo sapiens
  source 1..27: mol_type = other DNA
aaataatactaaatcatttgaagatat

SEQ ID NO: 3723 - DNA, 27 bp, Homo sapiens
  source 1..27: mol_type = other DNA
tcatttgaagatattcaccattataga

SEQ ID NO: 3724 - DNA, 27 bp, Homo sapiens
  source 1..27: mol_type = other DNA
atttgaagatattcaccattatagaga

SEQ ID NO: 3725 - DNA, 27 bp, Homo sapiens
  source 1..27: mol_type = other DNA
tttgaagatattcaccattatagagaa

SEQ ID NO: 3726 - DNA, 27 bp, Homo sapiens
  source 1..27: mol_type = other DNA
ttgaagatattcaccattatagagaac

SEQ ID NO: 3727 - DNA, 27 bp, Homo sapiens
  source 1..27: mol_type = other DNA
tgaagatattcaccattatagagaaca

SEQ ID NO: 3728 - DNA, 27 bp, Homo sapiens
  source 1..27: mol_type = other DNA
caccattatagagaacaaattaaaaga

SEQ ID NO: 3729 - DNA, 27 bp, Homo sapiens
  source 1..27: mol_type = other DNA
ccattatagagaacaaattaaaagagt

SEQ ID NO: 3730 - DNA, 27 bp, Homo sapiens
  source 1..27: mol_type = other DNA
cattatagagaacaaattaaaagagtt

SEQ ID NO: 3731 - DNA, 27 bp, Homo sapiens
  source 1..27: mol_type = other DNA
attatagagaacaaattaaaagagtta

SEQ ID NO: 3732 - DNA, 27 bp, Homo sapiens
  source 1..27: mol_type = other DNA
ttatagagaacaaattaaaagagttaa

SEQ ID NO: 3733 - DNA, 27 bp, Homo sapiens
  source 1..27: mol_type = other DNA
tcctagtaggaaataaatgtgatttgc

SEQ ID NO: 3734 - DNA, 27 bp, Homo sapiens
  source 1..27: mol_type = other DNA
cctagtaggaaataaatgtgatttgcc

SEQ ID NO: 3735 - DNA, 27 bp, Homo sapiens
  source 1..27: mol_type = other DNA
gcaagaagttatggaattccttttatt

SEQ ID NO: 3736 - DNA, 27 bp, Homo sapiens
  source 1..27: mol_type = other DNA
agaagttatggaattccttttattgaa

SEQ ID NO: 3737 - DNA, 27 bp, Homo sapiens
  source 1..27: mol_type = other DNA
gaagttatggaattccttttattgaaa

SEQ ID NO: 3738 - DNA, 27 bp, Homo sapiens
  source 1..27: mol_type = other DNA
aagttatggaattccttttattgaaac

SEQ ID NO: 3739 - DNA, 27 bp, Homo sapiens
  source 1..27: mol_type = other DNA
agttatggaattccttttattgaaaca

SEQ ID NO: 3740 - DNA, 27 bp, Homo sapiens
  source 1..27: mol_type = other DNA
agtggaggatgctttttatacattggt

SEQ ID NO: 3741 - DNA, 27 bp, Homo sapiens
  source 1..27: mol_type = other DNA
tggaggatgctttttatacattggtga

SEQ ID NO: 3742 - DNA, 27 bp, Homo sapiens
  source 1..27: mol_type = other DNA
atacagattgaaaaaaatcagcaaaga

SEQ ID NO: 3743 - DNA, 27 bp, Homo sapiens
  source 1..27: mol_type = other DNA
tacagattgaaaaaaatcagcaaagaa

SEQ ID NO: 3744 - DNA, 27 bp, Homo sapiens
  source 1..27: mol_type = other DNA
cagattgaaaaaaatcagcaaagaaga

SEQ ID NO: 3745 - DNA, 27 bp, Homo sapiens
  source 1..27: mol_type = other DNA
agattgaaaaaaatcagcaaagaagaa

SEQ ID NO: 3746 - DNA, 27 bp, Homo sapiens
  source 1..27: mol_type = other DNA
gattgaaaaaaatcagcaaagaagaaa

SEQ ID NO: 3747 - DNA, 27 bp, Homo sapiens
  source 1..27: mol_type = other DNA
attgaaaaaaatcagcaaagaagaaaa

SEQ ID NO: 3748 - DNA, 27 bp, Homo sapiens
  source 1..27: mol_type = other DNA
actcctggctgtgtgaaaattaaaaaa

SEQ ID NO: 3749 - DNA, 27 bp, Homo sapiens
  source 1..27: mol_type = other DNA
ctggctgtgtgaaaattaaaaaatgca

SEQ ID NO: 3750 - DNA, 27 bp, Homo sapiens
  source 1..27: mol_type = other DNA
ctgtgtgaaaattaaaaaatgcattat

SEQ ID NO: 3751 - DNA, 27 bp, Homo sapiens
  source 1..27: mol_type = other DNA
tgtgtgaaaattaaaaaatgcattata

SEQ ID NO: 3752 - DNA, 27 bp, Homo sapiens
  source 1..27: mol_type = other DNA
gtgtgaaaattaaaaaatgcattataa

SEQ ID NO: 3753 - DNA, 27 bp, Homo sapiens
  source 1..27: mol_type = other DNA
tgtgaaaattaaaaaatgcattataat

SEQ ID NO: 3754 - DNA, 27 bp, Homo sapiens
  source 1..27: mol_type = other DNA
tgaaaattaaaaaatgcattataatgt

SEQ ID NO: 3755 - DNA, 27 bp, Homo sapiens
  source 1..27: mol_type = other DNA
gaaaattaaaaaatgcattataatgta

SEQ ID NO: 3756 - DNA, 27 bp, Homo sapiens
  source 1..27: mol_type = other DNA
aaaattaaaaaatgcattataatgtaa

SEQ ID NO: 3757 - DNA, 27 bp, Homo sapiens
  source 1..27: mol_type = other DNA
aaattaaaaaatgcattataatgtaat

SEQ ID NO: 3758 - DNA, 27 bp, Homo sapiens
  source 1..27: mol_type = other DNA
attaaaaaatgcattataatgtaatct

SEQ ID NO: 3759 - DNA, 27 bp, Homo sapiens
  source 1..27: mol_type = other DNA
aatgcattataatgtaatctgggtgtt

SEQ ID NO: 3760 - DNA, 27 bp, Homo sapiens
  source 1..27: mol_type = other DNA
agttcgagaaattcgaaaacataaaga

SEQ ID NO: 3761 - DNA, 27 bp, Homo sapiens
  source 1..27: mol_type = other DNA
gttcgagaaattcgaaaacataaagaa

SEQ ID NO: 3762 - DNA, 27 bp, Homo sapiens
  source 1..27: mol_type = other DNA
ttcgagaaattcgaaaacataaagaaa

SEQ ID NO: 3763 - DNA, 27 bp, Homo sapiens
  source 1..27: mol_type = other DNA
gagaaattcgaaaacataaagaaaaga

SEQ ID NO: 3764 - DNA, 27 bp, Homo sapiens
  source 1..27: mol_type = other DNA
attcgaaaacataaagaaaagatgagc

SEQ ID NO: 3765 - DNA, 27 bp, Homo sapiens
  source 1..27: mol_type = other DNA
ttcgaaaacataaagaaaagatgagca

SEQ ID NO: 3766 - DNA, 27 bp, Homo sapiens
  source 1..27: mol_type = other DNA
gcaaagatggtaaaaagaagaaaaaga

SEQ ID NO: 3767 - DNA, 27 bp, Homo sapiens
  source 1..27: mol_type = other DNA
caaagatggtaaaaagaagaaaaagaa

SEQ ID NO: 3768 - DNA, 27 bp, Homo sapiens
  source 1..27: mol_type = other DNA
aagatggtaaaaagaagaaaaagaagt

SEQ ID NO: 3769 - DNA, 27 bp, Homo sapiens
  source 1..27: mol_type = other DNA
agatggtaaaaagaagaaaaagaagtc

SEQ ID NO: 3770 - DNA, 27 bp, Homo sapiens
  source 1..27: mol_type = other DNA
gtaaaaagaagaaaaagaagtcaaaga

SEQ ID NO: 3771 - DNA, 27 bp, Homo sapiens
  source 1..27: mol_type = other DNA
taaaaagaagaaaaagaagtcaaagac

SEQ ID NO: 3772 - DNA, 27 bp, Homo sapiens
  source 1..27: mol_type = other DNA
aaaaagaagaaaaagaagtcaaagaca

SEQ ID NO: 3773 - DNA, 27 bp, Homo sapiens
  source 1..27: mol_type = other DNA
agtcaaagacaaagtgtgtaattatgt

SEQ ID NO: 3774 - DNA, 27 bp, Homo sapiens
  source 1..27: mol_type = other DNA
gtcaaagacaaagtgtgtaattatgta

SEQ ID NO: 3775 - DNA, 27 bp, Homo sapiens
  source 1..27: mol_type = other DNA
aagacaaagtgtgtaattatgtaaata

SEQ ID NO: 3776 - DNA, 27 bp, Homo sapiens
  source 1..27: mol_type = other DNA
gacaaagtgtgtaattatgtaaataca

SEQ ID NO: 3777 - DNA, 27 bp, Homo sapiens
  source 1..27: mol_type = other DNA
aagtgtgtaattatgtaaatacaattt

SEQ ID NO: 3778 - DNA, 27 bp, Homo sapiens
  source 1..27: mol_type = other DNA
gtgtgtaattatgtaaatacaatttgt

SEQ ID NO: 3779 - DNA, 27 bp, Homo sapiens
  source 1..27: mol_type = other DNA
gtgtaattatgtaaatacaatttgtac

SEQ ID NO: 3780 - DNA, 27 bp, Homo sapiens
  source 1..27: mol_type = other DNA
tgtaattatgtaaatacaatttgtact

SEQ ID NO: 3781 - DNA, 27 bp, Homo sapiens
  source 1..27: mol_type = other DNA
attatgtaaatacaatttgtacttttt

SEQ ID NO: 3782 - DNA, 27 bp, Homo sapiens
  source 1..27: mol_type = other DNA
ttatgtaaatacaatttgtactttttt

SEQ ID NO: 3783 - DNA, 27 bp, Homo sapiens
  source 1..27: mol_type = other DNA
tatgtaaatacaatttgtacttttttc

SEQ ID NO: 3784 - DNA, 27 bp, Homo sapiens
  source 1..27: mol_type = other DNA
atgtaaatacaatttgtacttttttct

SEQ ID NO: 3785 - DNA, 27 bp, Homo sapiens
  source 1..27: mol_type = other DNA
atacaatttgtacttttttcttaaggc

SEQ ID NO: 3786 - DNA, 27 bp, Homo sapiens
  source 1..27: mol_type = other DNA
tacaatttgtacttttttcttaaggca

SEQ ID NO: 3787 - DNA, 27 bp, Homo sapiens
  source 1..27: mol_type = other DNA
catactagtacaagtggtaatttttgt

SEQ ID NO: 3788 - DNA, 27 bp, Homo sapiens
  source 1..27: mol_type = other DNA
atactagtacaagtggtaatttttgta

SEQ ID NO: 3789 - DNA, 27 bp, Homo sapiens
  source 1..27: mol_type = other DNA
gtacaagtggtaatttttgtacattac

SEQ ID NO: 3790 - DNA, 27 bp, Homo sapiens
  source 1..27: mol_type = other DNA
tacaagtggtaatttttgtacattaca

SEQ ID NO: 3791 - DNA, 27 bp, Homo sapiens
  source 1..27: mol_type = other DNA
ggtaatttttgtacattacactaaatt

SEQ ID NO: 3792 - DNA, 27 bp, Homo sapiens
  source 1..27: mol_type = other DNA
gtaatttttgtacattacactaaatta

SEQ ID NO: 3793 - DNA, 27 bp, Homo sapiens
  source 1..27: mol_type = other DNA
taatttttgtacattacactaaattat

SEQ ID NO: 3794 - DNA, 27 bp, Homo sapiens
  source 1..27: mol_type = other DNA
aatttttgtacattacactaaattatt

SEQ ID NO: 3795 - DNA, 27 bp, Homo sapiens
  source 1..27: mol_type = other DNA
atttttgtacattacactaaattatta

SEQ ID NO: 3796 - DNA, 27 bp, Homo sapiens
  source 1..27: mol_type = other DNA
tacactaaattattagcatttgtttta

SEQ ID NO: 3797 - DNA, 27 bp, Homo sapiens
  source 1..27: mol_type = other DNA
cactaaattattagcatttgttttagc

SEQ ID NO: 3798 - DNA, 27 bp, Homo sapiens
  source 1..27: mol_type = other DNA
actaaattattagcatttgttttagca

SEQ ID NO: 3799 - DNA, 27 bp, Homo sapiens
  source 1..27: mol_type = other DNA
attattagcatttgttttagcattacc

SEQ ID NO: 3800 - DNA, 27 bp, Homo sapiens
  source 1..27: mol_type = other DNA
agcatttgttttagcattacctaattt

SEQ ID NO: 3801 - DNA, 27 bp, Homo sapiens
  source 1..27: mol_type = other DNA
gcatttgttttagcattacctaatttt

SEQ ID NO: 3802 - DNA, 27 bp, Homo sapiens
  source 1..27: mol_type = other DNA
atttgttttagcattacctaatttttt

SEQ ID NO: 3803 - DNA, 27 bp, Homo sapiens
  source 1..27: mol_type = other DNA
tttgttttagcattacctaattttttt

SEQ ID NO: 3804 - DNA, 27 bp, Homo sapiens
  source 1..27: mol_type = other DNA
ttgttttagcattacctaatttttttc

SEQ ID NO: 3805 - DNA, 27 bp, Homo sapiens
  source 1..27: mol_type = other DNA
tgttttagcattacctaatttttttcc

SEQ ID NO: 3806 - DNA, 27 bp, Homo sapiens
  source 1..27: mol_type = other DNA
cagactgttagcttttaccttaaatgc

SEQ ID NO: 3807 - DNA, 27 bp, Homo sapiens
  source 1..27: mol_type = other DNA
agactgttagcttttaccttaaatgct

SEQ ID NO: 3808 - DNA, 27 bp, Homo sapiens
  source 1..27: mol_type = other DNA
ttagcttttaccttaaatgcttatttt

SEQ ID NO: 3809 - DNA, 27 bp, Homo sapiens
  source 1..27: mol_type = other DNA
tagcttttaccttaaatgcttatttta

SEQ ID NO: 3810 - DNA, 27 bp, Homo sapiens
  source 1..27: mol_type = other DNA
agcttttaccttaaatgcttattttaa

SEQ ID NO: 3811 - DNA, 27 bp, Homo sapiens
  source 1..27: mol_type = other DNA
taccttaaatgcttattttaaaatgac

SEQ ID NO: 3812 - DNA, 27 bp, Homo sapiens
  source 1..27: mol_type = other DNA
accttaaatgcttattttaaaatgaca

SEQ ID NO: 3813 - DNA, 27 bp, Homo sapiens
  source 1..27: mol_type = other DNA
aatgcttattttaaaatgacagtggaa

SEQ ID NO: 3814 - DNA, 27 bp, Homo sapiens
  source 1..27: mol_type = other DNA
tgcttattttaaaatgacagtggaagt

SEQ ID NO: 3815 - DNA, 27 bp, Homo sapiens
  source 1..27: mol_type = other DNA
cagtggaagtttttttttcctctaagt

SEQ ID NO: 3816 - DNA, 27 bp, Homo sapiens
  source 1..27: mol_type = other DNA
gtggaagtttttttttcctctaagtgc

SEQ ID NO: 3817 - DNA, 27 bp, Homo sapiens
  source 1..27: mol_type = other DNA
tggaagtttttttttcctctaagtgcc

SEQ ID NO: 3818 - DNA, 27 bp, Homo sapiens
  source 1..27: mol_type = other DNA
agttttggtttttgaactagcaatgcc

SEQ ID NO: 3819 - DNA, 27 bp, Homo sapiens
  source 1..27: mol_type = other DNA
atgcctgtgaaaaagaaactgaatacc

SEQ ID NO: 3820 - DNA, 27 bp, Homo sapiens
  source 1..27: mol_type = other DNA
tgaaaaagaaactgaatacctaagatt

SEQ ID NO: 3821 - DNA, 27 bp, Homo sapiens
  source 1..27: mol_type = other DNA
gaaaaagaaactgaatacctaagattt

SEQ ID NO: 3822 - DNA, 27 bp, Homo sapiens
  source 1..27: mol_type = other DNA
gaaactgaatacctaagatttctgtct

SEQ ID NO: 3823 - DNA, 27 bp, Homo sapiens
  source 1..27: mol_type = other DNA
catgcagttgattacttcttatttttc

SEQ ID NO: 3824 - DNA, 27 bp, Homo sapiens
  source 1..27: mol_type = other DNA
atgcagttgattacttcttatttttct

SEQ ID NO: 3825 - DNA, 27 bp, Homo sapiens
  source 1..27: mol_type = other DNA
agttgattacttcttatttttcttacc

SEQ ID NO: 3826 - DNA, 27 bp, Homo sapiens
  source 1..27: mol_type = other DNA
acttcttatttttcttaccaattgtga

SEQ ID NO: 3827 - DNA, 27 bp, Homo sapiens
  source 1..27: mol_type = other DNA
cttcttatttttcttaccaattgtgaa

SEQ ID NO: 3828 - DNA, 27 bp, Homo sapiens
  source 1..27: mol_type = other DNA
ttcttatttttcttaccaattgtgaat

SEQ ID NO: 3829 - DNA, 27 bp, Homo sapiens
  source 1..27: mol_type = other DNA
gaatgttggtgtgaaacaaattaatga

SEQ ID NO: 3830 - DNA, 27 bp, Homo sapiens
  source 1..27: mol_type = other DNA
tgttggtgtgaaacaaattaatgaagc

SEQ ID NO: 3831 - DNA, 27 bp, Homo sapiens
  source 1..27: mol_type = other DNA
gttggtgtgaaacaaattaatgaagct

SEQ ID NO: 3832 - DNA, 27 bp, Homo sapiens
  source 1..27: mol_type = other DNA
gaaacaaattaatgaagcttttgaatc

SEQ ID NO: 3833 - DNA, 27 bp, Homo sapiens
  source 1..27: mol_type = other DNA
aaacaaattaatgaagcttttgaatca

SEQ ID NO: 3834 - DNA, 27 bp, Homo sapiens
  source 1..27: mol_type = other DNA
attctgtgttttatctagtcacataaa

SEQ ID NO: 3835 - DNA, 27 bp, Homo sapiens
  source 1..27: mol_type = other DNA
ttctgtgttttatctagtcacataaat

SEQ ID NO: 3836 - DNA, 27 bp, Homo sapiens
  source 1..27: mol_type = other DNA
tgtgttttatctagtcacataaatgga

SEQ ID NO: 3837 - DNA, 27 bp, Homo sapiens
  source 1..27: mol_type = other DNA
gtgttttatctagtcacataaatggat

SEQ ID NO: 3838 - DNA, 27 bp, Homo sapiens
  source 1..27: mol_type = other DNA
ttatctagtcacataaatggattaatt

SEQ ID NO: 3839 - DNA, 27 bp, Homo sapiens
  source 1..27: mol_type = other DNA
tatctagtcacataaatggattaatta

SEQ ID NO: 3840 - DNA, 27 bp, Homo sapiens
  source 1..27: mol_type = other DNA
cacataaatggattaattactaatttc

SEQ ID NO: 3841 - DNA, 27 bp, Homo sapiens
  source 1..27: mol_type = other DNA
acataaatggattaattactaatttca

SEQ ID NO: 3842 - DNA, 27 bp, Homo sapiens
  source 1..27: mol_type = other DNA
aatggattaattactaatttcagttga

SEQ ID NO: 3843 - DNA, 27 bp, Homo sapiens
  source 1..27: mol_type = other DNA
tggattaattactaatttcagttgaga

SEQ ID NO: 3844 - DNA, 27 bp, Homo sapiens
  source 1..27: mol_type = other DNA
ggattaattactaatttcagttgagac

SEQ ID NO: 3845 - DNA, 27 bp, Homo sapiens
  source 1..27: mol_type = other DNA
gattaattactaatttcagttgagacc

SEQ ID NO: 3846 - DNA, 27 bp, Homo sapiens
  source 1..27: mol_type = other DNA
tctaattggtttttactgaaacattga

SEQ ID NO: 3847 - DNA, 27 bp, Homo sapiens
  source 1..27: mol_type = other DNA
attggtttttactgaaacattgaggga

SEQ ID NO: 3848 - DNA, 27 bp, Homo sapiens
  source 1..27: mol_type = other DNA
ttggtttttactgaaacattgagggaa

SEQ ID NO: 3849 - DNA, 27 bp, Homo sapiens
  source 1..27: mol_type = other DNA
acattgagggaacacaaatttatgggc

SEQ ID NO: 3850 - DNA, 27 bp, Homo sapiens
  source 1..27: mol_type = other DNA
cattgagggaacacaaatttatgggct

SEQ ID NO: 3851 - DNA, 27 bp, Homo sapiens
  source 1..27: mol_type = other DNA
cctgatgaatgtaaagttacactgttc

SEQ ID NO: 3852 - DNA, 27 bp, Homo sapiens
  source 1..27: mol_type = other DNA
ctgatgaatgtaaagttacactgttca

SEQ ID NO: 3853 - DNA, 27 bp, Homo sapiens
  source 1..27: mol_type = other DNA
ccccaaaatattatattttttctataa

SEQ ID NO: 3854 - DNA, 27 bp, Homo sapiens
  source 1..27: mol_type = other DNA
cccaaaatattatattttttctataaa

SEQ ID NO: 3855 - DNA, 27 bp, Homo sapiens
  source 1..27: mol_type = other DNA
ccaaaatattatattttttctataaaa

SEQ ID NO: 3856 - DNA, 27 bp, Homo sapiens
  source 1..27: mol_type = other DNA
caaaatattatattttttctataaaaa

SEQ ID NO: 3857 - DNA, 27 bp, Homo sapiens
  source 1..27: mol_type = other DNA
aaatattatattttttctataaaaaga

SEQ ID NO: 3858 - DNA, 27 bp, Homo sapiens
  source 1..27: mol_type = other DNA
aatattatattttttctataaaaagaa

SEQ ID NO: 3859 - DNA, 27 bp, Homo sapiens
  source 1..27: mol_type = other DNA
atattatattttttctataaaaagaaa

SEQ ID NO: 3860 - DNA, 27 bp, Homo sapiens
  source 1..27: mol_type = other DNA
tattatattttttctataaaaagaaaa

SEQ ID NO: 3861 - DNA, 27 bp, Homo sapiens
  source 1..27: mol_type = other DNA
attatattttttctataaaaagaaaaa

SEQ ID NO: 3862 - DNA, 27 bp, Homo sapiens
  source 1..27: mol_type = other DNA
ttatattttttctataaaaagaaaaaa

SEQ ID NO: 3863 - DNA, 27 bp, Homo sapiens
  source 1..27: mol_type = other DNA
tatattttttctataaaaagaaaaaaa

SEQ ID NO: 3864 - DNA, 27 bp, Homo sapiens
  source 1..27: mol_type = other DNA
atattttttctataaaaagaaaaaaat

SEQ ID NO: 3865 - DNA, 27 bp, Homo sapiens
  source 1..27: mol_type = other DNA
ttttctataaaaagaaaaaaatggaaa

SEQ ID NO: 3866 - DNA, 27 bp, Homo sapiens
  source 1..27: mol_type = other DNA
tttctataaaaagaaaaaaatggaaaa

SEQ ID NO: 3867 - DNA, 27 bp, Homo sapiens
  source 1..27: mol_type = other DNA
tctataaaaagaaaaaaatggaaaaaa

SEQ ID NO: 3868 - DNA, 27 bp, Homo sapiens
  source 1..27: mol_type = other DNA
ctataaaaagaaaaaaatggaaaaaaa

SEQ ID NO: 3869 - DNA, 27 bp, Homo sapiens
  source 1..27: mol_type = other DNA
tataaaaagaaaaaaatggaaaaaaat

SEQ ID NO: 3870 - DNA, 27 bp, Homo sapiens
  source 1..27: mol_type = other DNA
ataaaaagaaaaaaatggaaaaaaatt

SEQ ID NO: 3871 - DNA, 27 bp, Homo sapiens
  source 1..27: mol_type = other DNA
taaaaagaaaaaaatggaaaaaaatta

SEQ ID NO: 3872 - DNA, 27 bp, Homo sapiens
  source 1..27: mol_type = other DNA
aaaaagaaaaaaatggaaaaaaattac

SEQ ID NO: 3873 - DNA, 27 bp, Homo sapiens
  source 1..27: mol_type = other DNA
aaaagaaaaaaatggaaaaaaattaca

SEQ ID NO: 3874 - DNA, 27 bp, Homo sapiens
  source 1..27: mol_type = other DNA
gaaaaaaatggaaaaaaattacaaggc

SEQ ID NO: 3875 - DNA, 27 bp, Homo sapiens
  source 1..27: mol_type = other DNA
aaaaaaatggaaaaaaattacaaggca

SEQ ID NO: 3876 - DNA, 27 bp, Homo sapiens
  source 1..27: mol_type = other DNA
aatggaaaaaaattacaaggcaatgga

SEQ ID NO: 3877 - DNA, 27 bp, Homo sapiens
  source 1..27: mol_type = other DNA
atggaaaaaaattacaaggcaatggaa

SEQ ID NO: 3878 - DNA, 27 bp, Homo sapiens
  source 1..27: mol_type = other DNA
tggaaaaaaattacaaggcaatggaaa

SEQ ID NO: 3879 - DNA, 27 bp, Homo sapiens
  source 1..27: mol_type = other DNA
aggccatttccttttcacattagataa

SEQ ID NO: 3880 - DNA, 27 bp, Homo sapiens
  source 1..27: mol_type = other DNA
tttccttttcacattagataaattact

SEQ ID NO: 3881 - DNA, 27 bp, Homo sapiens
  source 1..27: mol_type = other DNA
ttcacattagataaattactataaaga

SEQ ID NO: 3882 - DNA, 27 bp, Homo sapiens
  source 1..27: mol_type = other DNA
tcacattagataaattactataaagac

SEQ ID NO: 3883 - DNA, 27 bp, Homo sapiens
  source 1..27: mol_type = other DNA
cacattagataaattactataaagact

SEQ ID NO: 3884 - DNA, 27 bp, Homo sapiens
  source 1..27: mol_type = other DNA
ccagtatgaaatggggattattatagc

SEQ ID NO: 3885 - DNA, 27 bp, Homo sapiens
  source 1..27: mol_type = other DNA
aatggggattattatagcaaccatttt

SEQ ID NO: 3886 - DNA, 27 bp, Homo sapiens
  source 1..27: mol_type = other DNA
ggggctatatttacatgctactaaatt

SEQ ID NO: 3887 - DNA, 27 bp, Homo sapiens
  source 1..27: mol_type = other DNA
gggctatatttacatgctactaaattt

SEQ ID NO: 3888 - DNA, 27 bp, Homo sapiens
  source 1..27: mol_type = other DNA
ggctatatttacatgctactaaatttt

SEQ ID NO: 3889 - DNA, 27 bp, Homo sapiens
  source 1..27: mol_type = other DNA
gctatatttacatgctactaaattttt

SEQ ID NO: 3890 - DNA, 27 bp, Homo sapiens
  source 1..27: mol_type = other DNA
ctatatttacatgctactaaattttta

SEQ ID NO: 3891 - DNA, 27 bp, Homo sapiens
  source 1..27: mol_type = other DNA
tttacatgctactaaatttttataata

SEQ ID NO: 3892 - DNA, 27 bp, Homo sapiens
  source 1..27: mol_type = other DNA
gctactaaatttttataataattgaaa

SEQ ID NO: 3893 - DNA, 27 bp, Homo sapiens
  source 1..27: mol_type = other DNA
ctactaaatttttataataattgaaaa

SEQ ID NO: 3894 - DNA, 27 bp, Homo sapiens
  source 1..27: mol_type = other DNA
actaaatttttataataattgaaaaga

SEQ ID NO: 3895 - DNA, 27 bp, Homo sapiens
  source 1..27: mol_type = other DNA
ctaaatttttataataattgaaaagat

SEQ ID NO: 3896 - DNA, 27 bp, Homo sapiens
  source 1..27: mol_type = other DNA
taaatttttataataattgaaaagatt

SEQ ID NO: 3897 - DNA, 27 bp, Homo sapiens
  source 1..27: mol_type = other DNA
aaatttttataataattgaaaagattt

SEQ ID NO: 3898 - DNA, 27 bp, Homo sapiens
  source 1..27: mol_type = other DNA
aatttttataataattgaaaagatttt

SEQ ID NO: 3899 - DNA, 27 bp, Homo sapiens
  source 1..27: mol_type = other DNA
atttttataataattgaaaagatttta

SEQ ID NO: 3900 - DNA, 27 bp, Homo sapiens
  source 1..27: mol_type = other DNA
tttttataataattgaaaagattttaa

SEQ ID NO: 3901 - DNA, 27 bp, Homo sapiens
  source 1..27: mol_type = other DNA
ttttataataattgaaaagattttaac

SEQ ID NO: 3902 - DNA, 27 bp, Homo sapiens
  source 1..27: mol_type = other DNA
tttataataattgaaaagattttaaca

SEQ ID NO: 3903 - DNA, 27 bp, Homo sapiens
  source 1..27: mol_type = other DNA
taataattgaaaagattttaacaagta

SEQ ID NO: 3904 - DNA, 27 bp, Homo sapiens
  source 1..27: mol_type = other DNA
aataattgaaaagattttaacaagtat

SEQ ID NO: 3905 - DNA, 27 bp, Homo sapiens
  source 1..27: mol_type = other DNA
taattgaaaagattttaacaagtataa

SEQ ID NO: 3906 - DNA, 27 bp, Homo sapiens
  source 1..27: mol_type = other DNA
aattgaaaagattttaacaagtataaa

SEQ ID NO: 3907 - DNA, 27 bp, Homo sapiens
  source 1..27: mol_type = other DNA
attgaaaagattttaacaagtataaaa

SEQ ID NO: 3908 - DNA, 27 bp, Homo sapiens
  source 1..27: mol_type = other DNA
ttgaaaagattttaacaagtataaaaa

SEQ ID NO: 3909 - DNA, 27 bp, Homo sapiens
  source 1..27: mol_type = other DNA
tgaaaagattttaacaagtataaaaaa

SEQ ID NO: 3910 - DNA, 27 bp, Homo sapiens
  source 1..27: mol_type = other DNA
gaaaagattttaacaagtataaaaaat

SEQ ID NO: 3911 - DNA, 27 bp, Homo sapiens
  source 1..27: mol_type = other DNA
aaaagattttaacaagtataaaaaatt

SEQ ID NO: 3912 - DNA, 27 bp, Homo sapiens
  source 1..27: mol_type = other DNA
aaagattttaacaagtataaaaaattc

SEQ ID NO: 3913 - DNA, 27 bp, Homo sapiens
  source 1..27: mol_type = other DNA
aagattttaacaagtataaaaaattct

SEQ ID NO: 3914 - DNA, 27 bp, Homo sapiens
  source 1..27: mol_type = other DNA
taacaagtataaaaaattctcatagga

SEQ ID NO: 3915 - DNA, 27 bp, Homo sapiens
  source 1..27: mol_type = other DNA
aacaagtataaaaaattctcataggaa

SEQ ID NO: 3916 - DNA, 27 bp, Homo sapiens
  source 1..27: mol_type = other DNA
acaagtataaaaaattctcataggaat

SEQ ID NO: 3917 - DNA, 27 bp, Homo sapiens
  source 1..27: mol_type = other DNA
caagtataaaaaattctcataggaatt

SEQ ID NO: 3918 - DNA, 27 bp, Homo sapiens
  source 1..27: mol_type = other DNA
aagtataaaaaattctcataggaatta

SEQ ID NO: 3919 - DNA, 27 bp, Homo sapiens
  source 1..27: mol_type = other DNA
agtataaaaaattctcataggaattaa

SEQ ID NO: 3920 - DNA, 27 bp, Homo sapiens
  source 1..27: mol_type = other DNA
gtataaaaaattctcataggaattaaa

SEQ ID NO: 3921 - DNA, 27 bp, Homo sapiens
  source 1..27: mol_type = other DNA
tataaaaaattctcataggaattaaat

SEQ ID NO: 3922 - DNA, 27 bp, Homo sapiens
  source 1..27: mol_type = other DNA
taaaaaattctcataggaattaaatgt

SEQ ID NO: 3923 - DNA, 27 bp, Homo sapiens
  source 1..27: mol_type = other DNA
aaaaaattctcataggaattaaatgta

SEQ ID NO: 3924 - DNA, 27 bp, Homo sapiens
  source 1..27: mol_type = other DNA
tgctctttcatagtataactttaaatc

SEQ ID NO: 3925 - DNA, 27 bp, Homo sapiens
  source 1..27: mol_type = other DNA
tttcatagtataactttaaatcttttc

SEQ ID NO: 3926 - DNA, 27 bp, Homo sapiens
  source 1..27: mol_type = other DNA
ttcatagtataactttaaatcttttct

SEQ ID NO: 3927 - DNA, 27 bp, Homo sapiens
  source 1..27: mol_type = other DNA
actttaaatcttttcttcaacttgagt

SEQ ID NO: 3928 - DNA, 27 bp, Homo sapiens
  source 1..27: mol_type = other DNA
ctttaaatcttttcttcaacttgagtc

SEQ ID NO: 3929 - DNA, 27 bp, Homo sapiens
  source 1..27: mol_type = other DNA
tcaacttgagtctttgaagatagtttt

SEQ ID NO: 3930 - DNA, 27 bp, Homo sapiens
  source 1..27: mol_type = other DNA
aacttgagtctttgaagatagttttaa

SEQ ID NO: 3931 - DNA, 27 bp, Homo sapiens
  source 1..27: mol_type = other DNA
acttgagtctttgaagatagttttaat

SEQ ID NO: 3932 - DNA, 27 bp, Homo sapiens
  source 1..27: mol_type = other DNA
tgaagatagttttaattctgcttgtga

SEQ ID NO: 3933 - DNA, 27 bp, Homo sapiens
  source 1..27: mol_type = other DNA
gaagatagttttaattctgcttgtgac

SEQ ID NO: 3934 - DNA, 27 bp, Homo sapiens
  source 1..27: mol_type = other DNA
aagatagttttaattctgcttgtgaca

SEQ ID NO: 3935 - DNA, 27 bp, Homo sapiens
  source 1..27: mol_type = other DNA
tctgcttgtgacattaaaagattattt

SEQ ID NO: 3936 - DNA, 27 bp, Homo sapiens
  source 1..27: mol_type = other DNA
agagcattgcttttgtttcttaagaaa

SEQ ID NO: 3937 - DNA, 27 bp, Homo sapiens
  source 1..27: mol_type = other DNA
gagcattgcttttgtttcttaagaaaa

SEQ ID NO: 3938 - DNA, 27 bp, Homo sapiens
  source 1..27: mol_type = other DNA
tgcttttgtttcttaagaaaacaaact

SEQ ID NO: 3939 - DNA, 27 bp, Homo sapiens
  source 1..27: mol_type = other DNA
gtttcttaagaaaacaaactctttttt

SEQ ID NO: 3940 - DNA, 27 bp, Homo sapiens
  source 1..27: mol_type = other DNA
tttcttaagaaaacaaactctttttta

SEQ ID NO: 3941 - DNA, 27 bp, Homo sapiens
  source 1..27: mol_type = other DNA
ttcttaagaaaacaaactcttttttaa

SEQ ID NO: 3942 - DNA, 27 bp, Homo sapiens
  source 1..27: mol_type = other DNA
tcttaagaaaacaaactcttttttaaa

SEQ ID NO: 3943 - DNA, 27 bp, Homo sapiens
  source 1..27: mol_type = other DNA
cttaagaaaacaaactcttttttaaaa

SEQ ID NO: 3944 - DNA, 27 bp, Homo sapiens
  source 1..27: mol_type = other DNA
ttaagaaaacaaactcttttttaaaaa

SEQ ID NO: 3945 - DNA, 27 bp, Homo sapiens
  source 1..27: mol_type = other DNA
taagaaaacaaactcttttttaaaaat

SEQ ID NO: 3946 - DNA, 27 bp, Homo sapiens
  source 1..27: mol_type = other DNA
aaaacaaactcttttttaaaaattact

SEQ ID NO: 3947 - DNA, 27 bp, Homo sapiens
  source 1..27: mol_type = other DNA
aactcttttttaaaaattacttttaaa

SEQ ID NO: 3948 - DNA, 27 bp, Homo sapiens
  source 1..27: mol_type = other DNA
actcttttttaaaaattacttttaaat

SEQ ID NO: 3949 - DNA, 27 bp, Homo sapiens
  source 1..27: mol_type = other DNA
ctcttttttaaaaattacttttaaata

SEQ ID NO: 3950 - DNA, 27 bp, Homo sapiens
  source 1..27: mol_type = other DNA
tcttttttaaaaattacttttaaatat

SEQ ID NO: 3951 - DNA, 27 bp, Homo sapiens
  source 1..27: mol_type = other DNA
cttttttaaaaattacttttaaatatt

SEQ ID NO: 3952 - DNA, 27 bp, Homo sapiens
  source 1..27: mol_type = other DNA
ttttttaaaaattacttttaaatatta

SEQ ID NO: 3953 - DNA, 27 bp, Homo sapiens
  source 1..27: mol_type = other DNA
tttttaaaaattacttttaaatattaa

SEQ ID NO: 3954 - DNA, 27 bp, Homo sapiens
  source 1..27: mol_type = other DNA
ttttaaaaattacttttaaatattaac

SEQ ID NO: 3955 - DNA, 27 bp, Homo sapiens
  source 1..27: mol_type = other DNA
tttaaaaattacttttaaatattaact

SEQ ID NO: 3956 - DNA, 27 bp, Homo sapiens
  source 1..27: mol_type = other DNA
attacttttaaatattaactcaaaagt

SEQ ID NO: 3957 - DNA, 27 bp, Homo sapiens
  source 1..27: mol_type = other DNA
ttacttttaaatattaactcaaaagtt

SEQ ID NO: 3958 - DNA, 27 bp, Homo sapiens
  source 1..27: mol_type = other DNA
acttttaaatattaactcaaaagttga

SEQ ID NO: 3959 - DNA, 27 bp, Homo sapiens
  source 1..27: mol_type = other DNA
ttttaaatattaactcaaaagttgaga

SEQ ID NO: 3960 - DNA, 27 bp, Homo sapiens
  source 1..27: mol_type = other DNA
tttaaatattaactcaaaagttgagat

SEQ ID NO: 3961 - DNA, 27 bp, Homo sapiens
  source 1..27: mol_type = other DNA
ttaaatattaactcaaaagttgagatt

SEQ ID NO: 3962 - DNA, 27 bp, Homo sapiens
  source 1..27: mol_type = other DNA
taaatattaactcaaaagttgagattt

SEQ ID NO: 3963 - DNA, 27 bp, Homo sapiens
  source 1..27: mol_type = other DNA
gtggtgtgccaagacattaattttttt

SEQ ID NO: 3964 - DNA, 27 bp, Homo sapiens
  source 1..27: mol_type = other DNA
gtgccaagacattaattttttttttaa

SEQ ID NO: 3965 - DNA, 27 bp, Homo sapiens
  source 1..27: mol_type = other DNA
tgccaagacattaattttttttttaaa

SEQ ID NO: 3966 - DNA, 27 bp, Homo sapiens
  source 1..27: mol_type = other DNA
gacattaattttttttttaaacaatga

SEQ ID NO: 3967 - DNA, 27 bp, Homo sapiens
  source 1..27: mol_type = other DNA
acattaattttttttttaaacaatgaa

SEQ ID NO: 3968 - DNA, 27 bp, Homo sapiens
  source 1..27: mol_type = other DNA
attaattttttttttaaacaatgaagt

SEQ ID NO: 3969 - DNA, 27 bp, Homo sapiens
  source 1..27: mol_type = other DNA
taattttttttttaaacaatgaagtga

SEQ ID NO: 3970 - DNA, 27 bp, Homo sapiens
  source 1..27: mol_type = other DNA
aattttttttttaaacaatgaagtgaa

SEQ ID NO: 3971 - DNA, 27 bp, Homo sapiens
  source 1..27: mol_type = other DNA
attttttttttaaacaatgaagtgaaa

SEQ ID NO: 3972 - DNA, 27 bp, Homo sapiens
  source 1..27: mol_type = other DNA
ttttttttttaaacaatgaagtgaaaa

SEQ ID NO: 3973 - DNA, 27 bp, Homo sapiens
  source 1..27: mol_type = other DNA
tttttttttaaacaatgaagtgaaaaa

SEQ ID NO: 3974 - DNA, 27 bp, Homo sapiens
  source 1..27: mol_type = other DNA
tttttttaaacaatgaagtgaaaaagt

SEQ ID NO: 3975 - DNA, 27 bp, Homo sapiens
  source 1..27: mol_type = other DNA
ttttttaaacaatgaagtgaaaaagtt

SEQ ID NO: 3976 - DNA, 27 bp, Homo sapiens
  source 1..27: mol_type = other DNA
tttttaaacaatgaagtgaaaaagttt

SEQ ID NO: 3977 - DNA, 27 bp, Homo sapiens
  source 1..27: mol_type = other DNA
caatgaagtgaaaaagttttacaatct

SEQ ID NO: 3978 - DNA, 27 bp, Homo sapiens
  source 1..27: mol_type = other DNA
agtgaaaaagttttacaatctctaggt

SEQ ID NO: 3979 - DNA, 27 bp, Homo sapiens
  source 1..27: mol_type = other DNA
gtgaaaaagttttacaatctctaggtt

SEQ ID NO: 3980 - DNA, 27 bp, Homo sapiens
  source 1..27: mol_type = other DNA
tgaaaaagttttacaatctctaggttt

SEQ ID NO: 3981 - DNA, 27 bp, Homo sapiens
  source 1..27: mol_type = other DNA
acactggttaaattaacattgcataaa

SEQ ID NO: 3982 - DNA, 27 bp, Homo sapiens
  source 1..27: mol_type = other DNA
cactggttaaattaacattgcataaac

SEQ ID NO: 3983 - DNA, 27 bp, Homo sapiens
  source 1..27: mol_type = other DNA
actggttaaattaacattgcataaaca

SEQ ID NO: 3984 - DNA, 27 bp, Homo sapiens
  source 1..27: mol_type = other DNA
taacattgcataaacacttttcaagtc

SEQ ID NO: 3985 - DNA, 27 bp, Homo sapiens
  source 1..27: mol_type = other DNA
tttcaagtctgatccatatttaataat

SEQ ID NO: 3986 - DNA, 27 bp, Homo sapiens
  source 1..27: mol_type = other DNA
gatccatatttaataatgctttaaaat

SEQ ID NO: 3987 - DNA, 27 bp, Homo sapiens
  source 1..27: mol_type = other DNA
atccatatttaataatgctttaaaata

SEQ ID NO: 3988 - DNA, 27 bp, Homo sapiens
  source 1..27: mol_type = other DNA
tccatatttaataatgctttaaaataa

SEQ ID NO: 3989 - DNA, 27 bp, Homo sapiens
  source 1..27: mol_type = other DNA
ccatatttaataatgctttaaaataaa

SEQ ID NO: 3990 - DNA, 27 bp, Homo sapiens
  source 1..27: mol_type = other DNA
catatttaataatgctttaaaataaaa

SEQ ID NO: 3991 - DNA, 27 bp, Homo sapiens
  source 1..27: mol_type = other DNA
atatttaataatgctttaaaataaaaa

SEQ ID NO: 3992 - DNA, 27 bp, Homo sapiens
  source 1..27: mol_type = other DNA
atttaataatgctttaaaataaaaata

SEQ ID NO: 3993 - DNA, 27 bp, Homo sapiens
  source 1..27: mol_type = other DNA
tttaataatgctttaaaataaaaataa

SEQ ID NO: 3994 - DNA, 27 bp, Homo sapiens
  source 1..27: mol_type = other DNA
ttaataatgctttaaaataaaaataaa

SEQ ID NO: 3995 - DNA, 27 bp, Homo sapiens
  source 1..27: mol_type = other DNA
taataatgctttaaaataaaaataaaa

SEQ ID NO: 3996 - DNA, 27 bp, Homo sapiens
  source 1..27: mol_type = other DNA
gctttaaaataaaaataaaaacaatcc

SEQ ID NO: 3997 - DNA, 27 bp, Homo sapiens
  source 1..27: mol_type = other DNA
aaataaaaataaaaacaatccttttga

SEQ ID NO: 3998 - DNA, 27 bp, Homo sapiens
  source 1..27: mol_type = other DNA
aataaaaataaaaacaatccttttgat

SEQ ID NO: 3999 - DNA, 27 bp, Homo sapiens
  source 1..27: mol_type = other DNA
ataaaaataaaaacaatccttttgata

SEQ ID NO: 4000 - DNA, 27 bp, Homo sapiens
  source 1..27: mol_type = other DNA
taaaaataaaaacaatccttttgataa

SEQ ID NO: 4001 - DNA, 27 bp, Homo sapiens
  source 1..27: mol_type = other DNA
aaaaataaaaacaatccttttgataaa

SEQ ID NO: 4002 - DNA, 27 bp, Homo sapiens
  source 1..27: mol_type = other DNA
aaaataaaaacaatccttttgataaat

SEQ ID NO: 4003 - DNA, 27 bp, Homo sapiens
  source 1..27: mol_type = other DNA
aaataaaaacaatccttttgataaatt

SEQ ID NO: 4004 - DNA, 27 bp, Homo sapiens
  source 1..27: mol_type = other DNA
aataaaaacaatccttttgataaattt

SEQ ID NO: 4005 - DNA, 27 bp, Homo sapiens
  source 1..27: mol_type = other DNA
aaaacaatccttttgataaatttaaaa

SEQ ID NO: 4006 - DNA, 27 bp, Homo sapiens
  source 1..27: mol_type = other DNA
aatccttttgataaatttaaaatgtta

SEQ ID NO: 4007 - DNA, 27 bp, Homo sapiens
  source 1..27: mol_type = other DNA
atccttttgataaatttaaaatgttac

SEQ ID NO: 4008 - DNA, 27 bp, Homo sapiens
  source 1..27: mol_type = other DNA
tccttttgataaatttaaaatgttact

SEQ ID NO: 4009 - DNA, 27 bp, Homo sapiens
  source 1..27: mol_type = other DNA
tttgataaatttaaaatgttacttatt

SEQ ID NO: 4010 - DNA, 27 bp, Homo sapiens
  source 1..27: mol_type = other DNA
ttgataaatttaaaatgttacttattt

SEQ ID NO: 4011 - DNA, 27 bp, Homo sapiens
  source 1..27: mol_type = other DNA
tgataaatttaaaatgttacttatttt

SEQ ID NO: 4012 - DNA, 27 bp, Homo sapiens
  source 1..27: mol_type = other DNA
gataaatttaaaatgttacttatttta

SEQ ID NO: 4013 - DNA, 27 bp, Homo sapiens
  source 1..27: mol_type = other DNA
ataaatttaaaatgttacttattttaa

SEQ ID NO: 4014 - DNA, 27 bp, Homo sapiens
  source 1..27: mol_type = other DNA
taaatttaaaatgttacttattttaaa

SEQ ID NO: 4015 - DNA, 27 bp, Homo sapiens
  source 1..27: mol_type = other DNA
aatttaaaatgttacttattttaaaat

SEQ ID NO: 4016 - DNA, 27 bp, Homo sapiens
  source 1..27: mol_type = other DNA
atttaaaatgttacttattttaaaata

SEQ ID NO: 4017 - DNA, 27 bp, Homo sapiens
  source 1..27: mol_type = other DNA
tttaaaatgttacttattttaaaataa

SEQ ID NO: 4018 - DNA, 27 bp, Homo sapiens
  source 1..27: mol_type = other DNA
ttaaaatgttacttattttaaaataaa

SEQ ID NO: 4019 - DNA, 27 bp, Homo sapiens
  source 1..27: mol_type = other DNA
taaaatgttacttattttaaaataaat

SEQ ID NO: 4020 - DNA, 27 bp, Homo sapiens
  source 1..27: mol_type = other DNA
aaatgttacttattttaaaataaatga

SEQ ID NO: 4021 - DNA, 27 bp, Homo sapiens
  source 1..27: mol_type = other DNA
ttacttattttaaaataaatgaagtga

SEQ ID NO: 4022 - DNA, 27 bp, Homo sapiens
  source 1..27: mol_type = other DNA
acttattttaaaataaatgaagtgaga

SEQ ID NO: 4023 - DNA, 27 bp, Homo sapiens
  source 1..27: mol_type = other DNA
cttattttaaaataaatgaagtgagat

SEQ ID NO: 4024 - DNA, 27 bp, Homo sapiens
  source 1..27: mol_type = other DNA
attttaaaataaatgaagtgagatggc

SEQ ID NO: 4025 - DNA, 27 bp, Homo sapiens
  source 1..27: mol_type = other DNA
ttttaaaataaatgaagtgagatggca

SEQ ID NO: 4026 - DNA, 27 bp, Homo sapiens
  source 1..27: mol_type = other DNA
tatccatttcttcatgttaaaagaagt

SEQ ID NO: 4027 - DNA, 27 bp, Homo sapiens
  source 1..27: mol_type = other DNA
atccatttcttcatgttaaaagaagtc

SEQ ID NO: 4028 - DNA, 27 bp, Homo sapiens
  source 1..27: mol_type = other DNA
atctcaaactcttagtttttttttttt

SEQ ID NO: 4029 - DNA, 27 bp, Homo sapiens
  source 1..27: mol_type = other DNA
cttagttttttttttttacaactatgt

SEQ ID NO: 4030 - DNA, 27 bp, Homo sapiens
  source 1..27: mol_type = other DNA
ttagttttttttttttacaactatgta

SEQ ID NO: 4031 - DNA, 27 bp, Homo sapiens
  source 1..27: mol_type = other DNA
tagttttttttttttacaactatgtaa

SEQ ID NO: 4032 - DNA, 27 bp, Homo sapiens
  source 1..27: mol_type = other DNA
agttttttttttttacaactatgtaat

SEQ ID NO: 4033 - DNA, 27 bp, Homo sapiens
  source 1..27: mol_type = other DNA
gttttttttttttacaactatgtaatt

SEQ ID NO: 4034 - DNA, 27 bp, Homo sapiens
  source 1..27: mol_type = other DNA
ttttttttttttacaactatgtaattt

SEQ ID NO: 4035 - DNA, 27 bp, Homo sapiens
  source 1..27: mol_type = other DNA
tttttttttttacaactatgtaattta

SEQ ID NO: 4036 - DNA, 27 bp, Homo sapiens
  source 1..27: mol_type = other DNA
ttttttttttacaactatgtaatttat

SEQ ID NO: 4037 - DNA, 27 bp, Homo sapiens
  source 1..27: mol_type = other DNA
tttttttttacaactatgtaatttata

SEQ ID NO: 4038 - DNA, 27 bp, Homo sapiens
  source 1..27: mol_type = other DNA
ttttttttacaactatgtaatttatat

SEQ ID NO: 4039 - DNA, 27 bp, Homo sapiens
  source 1..27: mol_type = other DNA
tttttttacaactatgtaatttatatt

SEQ ID NO: 4040 - DNA, 27 bp, Homo sapiens
  source 1..27: mol_type = other DNA
acaactatgtaatttatattccattta

SEQ ID NO: 4041 - DNA, 27 bp, Homo sapiens
  source 1..27: mol_type = other DNA
caactatgtaatttatattccatttac

SEQ ID NO: 4042 - DNA, 27 bp, Homo sapiens
  source 1..27: mol_type = other DNA
aactatgtaatttatattccatttaca

SEQ ID NO: 4043 - DNA, 27 bp, Homo sapiens
  source 1..27: mol_type = other DNA
gtaatttatattccatttacataagga

SEQ ID NO: 4044 - DNA, 27 bp, Homo sapiens
  source 1..27: mol_type = other DNA
taatttatattccatttacataaggat

SEQ ID NO: 4045 - DNA, 27 bp, Homo sapiens
  source 1..27: mol_type = other DNA
aatttatattccatttacataaggata

SEQ ID NO: 4046 - DNA, 27 bp, Homo sapiens
  source 1..27: mol_type = other DNA
atttatattccatttacataaggatac

SEQ ID NO: 4047 - DNA, 27 bp, Homo sapiens
  source 1..27: mol_type = other DNA
tttacataaggatacacttatttgtca

SEQ ID NO: 4048 - DNA, 27 bp, Homo sapiens
  source 1..27: mol_type = other DNA
cataaggatacacttatttgtcaagct

SEQ ID NO: 4049 - DNA, 27 bp, Homo sapiens
  source 1..27: mol_type = other DNA
caatctgtaaatttttaacctatgtta

SEQ ID NO: 4050 - DNA, 27 bp, Homo sapiens
  source 1..27: mol_type = other DNA
aatctgtaaatttttaacctatgttac

SEQ ID NO: 4051 - DNA, 27 bp, Homo sapiens
  source 1..27: mol_type = other DNA
atctgtaaatttttaacctatgttaca

SEQ ID NO: 4052 - DNA, 27 bp, Homo sapiens
  source 1..27: mol_type = other DNA
tgtgcaagaggtgaagtttatatttga

SEQ ID NO: 4053 - DNA, 27 bp, Homo sapiens
  source 1..27: mol_type = other DNA
tgcaagaggtgaagtttatatttgaat

SEQ ID NO: 4054 - DNA, 27 bp, Homo sapiens
  source 1..27: mol_type = other DNA
gcaagaggtgaagtttatatttgaata

SEQ ID NO: 4055 - DNA, 27 bp, Homo sapiens
  source 1..27: mol_type = other DNA
aagaggtgaagtttatatttgaatatc

SEQ ID NO: 4056 - DNA, 27 bp, Homo sapiens
  source 1..27: mol_type = other DNA
agaggtgaagtttatatttgaatatcc

SEQ ID NO: 4057 - DNA, 27 bp, Homo sapiens
  source 1..27: mol_type = other DNA
tgaagtttatatttgaatatccattct

SEQ ID NO: 4058 - DNA, 27 bp, Homo sapiens
  source 1..27: mol_type = other DNA
tgacttgatgcagttttaatacttgta

SEQ ID NO: 4059 - DNA, 27 bp, Homo sapiens
  source 1..27: mol_type = other DNA
acttgatgcagttttaatacttgtaat

SEQ ID NO: 4060 - DNA, 27 bp, Homo sapiens
  source 1..27: mol_type = other DNA
gggatttgacctaatcactaattttca

SEQ ID NO: 4061 - DNA, 27 bp, Homo sapiens
  source 1..27: mol_type = other DNA
tgacctaatcactaattttcaggtggt

SEQ ID NO: 4062 - DNA, 27 bp, Homo sapiens
  source 1..27: mol_type = other DNA
gacagtaggatttttcaaacctggtat

SEQ ID NO: 4063 - DNA, 27 bp, Homo sapiens
  source 1..27: mol_type = other DNA
ccagtggaaggagaatttaataaagat

SEQ ID NO: 4064 - DNA, 27 bp, Homo sapiens
  source 1..27: mol_type = other DNA
gtggaaggagaatttaataaagatagt

SEQ ID NO: 4065 - DNA, 27 bp, Homo sapiens
  source 1..27: mol_type = other DNA
ggaaggagaatttaataaagatagtgc

SEQ ID NO: 4066 - DNA, 27 bp, Homo sapiens
  source 1..27: mol_type = other DNA
gaaggagaatttaataaagatagtgct

SEQ ID NO: 4067 - DNA, 27 bp, Homo sapiens
  source 1..27: mol_type = other DNA
gagaatttaataaagatagtgctgaaa

SEQ ID NO: 4068 - DNA, 27 bp, Homo sapiens
  source 1..27: mol_type = other DNA
attccttaggtaatctataactaggac

SEQ ID NO: 4069 - DNA, 27 bp, Homo sapiens
  source 1..27: mol_type = other DNA
ttccttaggtaatctataactaggact

SEQ ID NO: 4070 - DNA, 27 bp, Homo sapiens
  source 1..27: mol_type = other DNA
gtaacagtaatacattccattgtttta

SEQ ID NO: 4071 - DNA, 27 bp, Homo sapiens
  source 1..27: mol_type = other DNA
aacagtaatacattccattgttttagt

SEQ ID NO: 4072 - DNA, 27 bp, Homo sapiens
  source 1..27: mol_type = other DNA
acagtaatacattccattgttttagta

SEQ ID NO: 4073 - DNA, 27 bp, Homo sapiens
  source 1..27: mol_type = other DNA
cagtaatacattccattgttttagtaa

SEQ ID NO: 4074 - DNA, 27 bp, Homo sapiens
  source 1..27: mol_type = other DNA
ttccattgttttagtaaccagaaatct

SEQ ID NO: 4075 - DNA, 27 bp, Homo sapiens
  source 1..27: mol_type = other DNA
taaccagaaatcttcatgcaatgaaaa

SEQ ID NO: 4076 - DNA, 27 bp, Homo sapiens
  source 1..27: mol_type = other DNA
tcttcatgcaatgaaaaatactttaat

SEQ ID NO: 4077 - DNA, 27 bp, Homo sapiens
  source 1..27: mol_type = other DNA
gcaatgaaaaatactttaattcatgaa

SEQ ID NO: 4078 - DNA, 27 bp, Homo sapiens
  source 1..27: mol_type = other DNA
aatgaaaaatactttaattcatgaagc

SEQ ID NO: 4079 - DNA, 27 bp, Homo sapiens
  source 1..27: mol_type = other DNA
atgaaaaatactttaattcatgaagct

SEQ ID NO: 4080 - DNA, 27 bp, Homo sapiens
  source 1..27: mol_type = other DNA
aattcatgaagcttacttttttttttt

SEQ ID NO: 4081 - DNA, 27 bp, Homo sapiens
  source 1..27: mol_type = other DNA
tcatgaagcttactttttttttttggt

SEQ ID NO: 4082 - DNA, 27 bp, Homo sapiens
  source 1..27: mol_type = other DNA
gaagcttactttttttttttggtgtca

SEQ ID NO: 4083 - DNA, 27 bp, Homo sapiens
  source 1..27: mol_type = other DNA
cttactttttttttttggtgtcagagt

SEQ ID NO: 4084 - DNA, 27 bp, Homo sapiens
  source 1..27: mol_type = other DNA
ttactttttttttttggtgtcagagtc

SEQ ID NO: 4085 - DNA, 27 bp, Homo sapiens
  source 1..27: mol_type = other DNA
tcaactaatttttgtatttttaggaga

SEQ ID NO: 4086 - DNA, 27 bp, Homo sapiens
  source 1..27: mol_type = other DNA
actaatttttgtatttttaggagagac

SEQ ID NO: 4087 - DNA, 27 bp, Homo sapiens
  source 1..27: mol_type = other DNA
aactcatttattcagcaaatatttatt

SEQ ID NO: 4088 - DNA, 27 bp, Homo sapiens
  source 1..27: mol_type = other DNA
ctcatttattcagcaaatatttattga

SEQ ID NO: 4089 - DNA, 27 bp, Homo sapiens
  source 1..27: mol_type = other DNA
catttattcagcaaatatttattgagt

SEQ ID NO: 4090 - DNA, 27 bp, Homo sapiens
  source 1..27: mol_type = other DNA
cgtattttagttttgcaaagaaggggt

SEQ ID NO: 4091 - DNA, 27 bp, Homo sapiens
  source 1..27: mol_type = other DNA
agctctataattgttttgctacgattc

SEQ ID NO: 4092 - DNA, 27 bp, Homo sapiens
  source 1..27: mol_type = other DNA
gctactttatgtaaatcacttcattgt

SEQ ID NO: 4093 - DNA, 27 bp, Homo sapiens
  source 1..27: mol_type = other DNA
ctactttatgtaaatcacttcattgtt

SEQ ID NO: 4094 - DNA, 27 bp, Homo sapiens
  source 1..27: mol_type = other DNA
tactttatgtaaatcacttcattgttt

SEQ ID NO: 4095 - DNA, 27 bp, Homo sapiens
  source 1..27: mol_type = other DNA
actttatgtaaatcacttcattgtttt

SEQ ID NO: 4096 - DNA, 27 bp, Homo sapiens
  source 1..27: mol_type = other DNA
ctttatgtaaatcacttcattgtttta

SEQ ID NO: 4097 - DNA, 27 bp, Homo sapiens
  source 1..27: mol_type = other DNA
tttatgtaaatcacttcattgttttaa

SEQ ID NO: 4098 - DNA, 27 bp, Homo sapiens
  source 1..27: mol_type = other DNA
ttatgtaaatcacttcattgttttaaa

SEQ ID NO: 4099 - DNA, 27 bp, Homo sapiens
  source 1..27: mol_type = other DNA
tcattgttttaaaggaataaacttgat

SEQ ID NO: 4100 - DNA, 27 bp, Homo sapiens
  source 1..27: mol_type = other DNA
cattgttttaaaggaataaacttgatt

SEQ ID NO: 4101 - DNA, 27 bp, Homo sapiens
  source 1..27: mol_type = other DNA
tgttttaaaggaataaacttgattata

SEQ ID NO: 4102 - DNA, 27 bp, Homo sapiens
  source 1..27: mol_type = other DNA
gttttaaaggaataaacttgattatat

SEQ ID NO: 4103 - DNA, 27 bp, Homo sapiens
  source 1..27: mol_type = other DNA
ttttaaaggaataaacttgattatatt

SEQ ID NO: 4104 - DNA, 27 bp, Homo sapiens
  source 1..27: mol_type = other DNA
ttaaaggaataaacttgattatattgt

SEQ ID NO: 4105 - DNA, 27 bp, Homo sapiens
  source 1..27: mol_type = other DNA
taaaggaataaacttgattatattgtt

SEQ ID NO: 4106 - DNA, 27 bp, Homo sapiens
  source 1..27: mol_type = other DNA
aaaggaataaacttgattatattgttt

SEQ ID NO: 4107 - DNA, 27 bp, Homo sapiens
  source 1..27: mol_type = other DNA
aaggaataaacttgattatattgtttt

SEQ ID NO: 4108 - DNA, 27 bp, Homo sapiens
  source 1..27: mol_type = other DNA
aggaataaacttgattatattgttttt

SEQ ID NO: 4109 - DNA, 27 bp, Homo sapiens
  source 1..27: mol_type = other DNA
taaacttgattatattgtttttttatt

SEQ ID NO: 4110 - DNA, 27 bp, Homo sapiens
  source 1..27: mol_type = other DNA
aaacttgattatattgtttttttattt

SEQ ID NO: 4111 - DNA, 27 bp, Homo sapiens
  source 1..27: mol_type = other DNA
cttgattatattgtttttttatttggc

SEQ ID NO: 4112 - DNA, 27 bp, Homo sapiens
  source 1..27: mol_type = other DNA
ttatattgtttttttatttggcataac

SEQ ID NO: 4113 - DNA, 27 bp, Homo sapiens
  source 1..27: mol_type = other DNA
tatattgtttttttatttggcataact

SEQ ID NO: 4114 - DNA, 27 bp, Homo sapiens
  source 1..27: mol_type = other DNA
ttgtttttttatttggcataactgtga

SEQ ID NO: 4115 - DNA, 27 bp, Homo sapiens
  source 1..27: mol_type = other DNA
tgtttttttatttggcataactgtgat

SEQ ID NO: 4116 - DNA, 27 bp, Homo sapiens
  source 1..27: mol_type = other DNA
tggcataactgtgattcttttaggaca

SEQ ID NO: 4117 - DNA, 27 bp, Homo sapiens
  source 1..27: mol_type = other DNA
taactgtgattcttttaggacaattac

SEQ ID NO: 4118 - DNA, 27 bp, Homo sapiens
  source 1..27: mol_type = other DNA
aactgtgattcttttaggacaattact

SEQ ID NO: 4119 - DNA, 27 bp, Homo sapiens
  source 1..27: mol_type = other DNA
aaggtgtatgtcagatattcatattga

SEQ ID NO: 4120 - DNA, 27 bp, Homo sapiens
  source 1..27: mol_type = other DNA
aggtgtatgtcagatattcatattgac

SEQ ID NO: 4121 - DNA, 27 bp, Homo sapiens
  source 1..27: mol_type = other DNA
cccaaatgtgtaatattccagttttct

SEQ ID NO: 4122 - DNA, 27 bp, Homo sapiens
  source 1..27: mol_type = other DNA
tgcataagtaattaaaatatacttaaa

SEQ ID NO: 4123 - DNA, 27 bp, Homo sapiens
  source 1..27: mol_type = other DNA
gcataagtaattaaaatatacttaaaa

SEQ ID NO: 4124 - DNA, 27 bp, Homo sapiens
  source 1..27: mol_type = other DNA
cataagtaattaaaatatacttaaaaa

SEQ ID NO: 4125 - DNA, 27 bp, Homo sapiens
  source 1..27: mol_type = other DNA
ataagtaattaaaatatacttaaaaat

SEQ ID NO: 4126 - DNA, 27 bp, Homo sapiens
  source 1..27: mol_type = other DNA
taagtaattaaaatatacttaaaaatt

SEQ ID NO: 4127 - DNA, 27 bp, Homo sapiens
  source 1..27: mol_type = other DNA
aagtaattaaaatatacttaaaaatta

SEQ ID NO: 4128 - DNA, 27 bp, Homo sapiens
  source 1..27: mol_type = other DNA
agtaattaaaatatacttaaaaattaa

SEQ ID NO: 4129 - DNA, 27 bp, Homo sapiens
  source 1..27: mol_type = other DNA
gtaattaaaatatacttaaaaattaat

SEQ ID NO: 4130 - DNA, 27 bp, Homo sapiens
  source 1..27: mol_type = other DNA
taattaaaatatacttaaaaattaata

SEQ ID NO: 4131 - DNA, 27 bp, Homo sapiens
  source 1..27: mol_type = other DNA
attaaaatatacttaaaaattaatagt

SEQ ID NO: 4132 - DNA, 27 bp, Homo sapiens
  source 1..27: mol_type = other DNA
ttaaaatatacttaaaaattaatagtt

SEQ ID NO: 4133 - DNA, 27 bp, Homo sapiens
  source 1..27: mol_type = other DNA
taaaatatacttaaaaattaatagttt

SEQ ID NO: 4134 - DNA, 27 bp, Homo sapiens
  source 1..27: mol_type = other DNA
aaaatatacttaaaaattaatagtttt

SEQ ID NO: 4135 - DNA, 27 bp, Homo sapiens
  source 1..27: mol_type = other DNA
tatacttaaaaattaatagttttatct

SEQ ID NO: 4136 - DNA, 27 bp, Homo sapiens
  source 1..27: mol_type = other DNA
cttaaaaattaatagttttatctgggt

SEQ ID NO: 4137 - DNA, 27 bp, Homo sapiens
  source 1..27: mol_type = other DNA
ttaaaaattaatagttttatctgggta

SEQ ID NO: 4138 - DNA, 27 bp, Homo sapiens
  source 1..27: mol_type = other DNA
taaaaattaatagttttatctgggtac

SEQ ID NO: 4139 - DNA, 27 bp, Homo sapiens
  source 1..27: mol_type = other DNA
ttatctgggtacaaataaacaggtgcc

SEQ ID NO: 4140 - DNA, 27 bp, Homo sapiens
  source 1..27: mol_type = other DNA
cagacaaggaaacttctatgtaaaaat

SEQ ID NO: 4141 - DNA, 27 bp, Homo sapiens
  source 1..27: mol_type = other DNA
agacaaggaaacttctatgtaaaaatc

SEQ ID NO: 4142 - DNA, 27 bp, Homo sapiens
  source 1..27: mol_type = other DNA
gacaaggaaacttctatgtaaaaatca

SEQ ID NO: 4143 - DNA, 27 bp, Homo sapiens
  source 1..27: mol_type = other DNA
acttctatgtaaaaatcactatgattt

SEQ ID NO: 4144 - DNA, 27 bp, Homo sapiens
  source 1..27: mol_type = other DNA
cttctatgtaaaaatcactatgatttc

SEQ ID NO: 4145 - DNA, 27 bp, Homo sapiens
  source 1..27: mol_type = other DNA
ttctatgtaaaaatcactatgatttct

SEQ ID NO: 4146 - DNA, 27 bp, Homo sapiens
  source 1..27: mol_type = other DNA
atgtaaaaatcactatgatttctgaat

SEQ ID NO: 4147 - DNA, 27 bp, Homo sapiens
  source 1..27: mol_type = other DNA
tgtaaaaatcactatgatttctgaatt

SEQ ID NO: 4148 - DNA, 27 bp, Homo sapiens
  source 1..27: mol_type = other DNA
cactatgatttctgaattgctatgtga

SEQ ID NO: 4149 - DNA, 27 bp, Homo sapiens
  source 1..27: mol_type = other DNA
actatgatttctgaattgctatgtgaa

SEQ ID NO: 4150 - DNA, 27 bp, Homo sapiens
  source 1..27: mol_type = other DNA
gctatgtgaaactacagatctttggaa

SEQ ID NO: 4151 - DNA, 27 bp, Homo sapiens
  source 1..27: mol_type = other DNA
ctatgtgaaactacagatctttggaac

SEQ ID NO: 4152 - DNA, 27 bp, Homo sapiens
  source 1..27: mol_type = other DNA
gtagggtgttaagacttacacagtacc

SEQ ID NO: 4153 - DNA, 27 bp, Homo sapiens
  source 1..27: mol_type = other DNA
tatttaggcctcttgaatttttgatgt

SEQ ID NO: 4154 - DNA, 27 bp, Homo sapiens
  source 1..27: mol_type = other DNA
cctcttgaatttttgatgtagatgggc

SEQ ID NO: 4155 - DNA, 27 bp, Homo sapiens
  source 1..27: mol_type = other DNA
ctcttgaatttttgatgtagatgggca

SEQ ID NO: 4156 - DNA, 27 bp, Homo sapiens
  source 1..27: mol_type = other DNA
tgtagatgggcatttttttaaggtagt

SEQ ID NO: 4157 - DNA, 27 bp, Homo sapiens
  source 1..27: mol_type = other DNA
tgggcatttttttaaggtagtggttaa

SEQ ID NO: 4158 - DNA, 27 bp, Homo sapiens
  source 1..27: mol_type = other DNA
taaggtagtggttaattacctttatgt

SEQ ID NO: 4159 - DNA, 27 bp, Homo sapiens
  source 1..27: mol_type = other DNA
aggtagtggttaattacctttatgtga

SEQ ID NO: 4160 - DNA, 27 bp, Homo sapiens
  source 1..27: mol_type = other DNA
ggtagtggttaattacctttatgtgaa

SEQ ID NO: 4161 - DNA, 27 bp, Homo sapiens
  source 1..27: mol_type = other DNA
gtagtggttaattacctttatgtgaac

SEQ ID NO: 4162 - DNA, 27 bp, Homo sapiens
  source 1..27: mol_type = other DNA
tagtggttaattacctttatgtgaact

SEQ ID NO: 4163 - DNA, 27 bp, Homo sapiens
  source 1..27: mol_type = other DNA
ttacctttatgtgaactttgaatggtt

SEQ ID NO: 4164 - DNA, 27 bp, Homo sapiens
  source 1..27: mol_type = other DNA
tttatgtgaactttgaatggtttaaca

SEQ ID NO: 4165 - DNA, 27 bp, Homo sapiens
  source 1..27: mol_type = other DNA
tgaactttgaatggtttaacaaaagat

SEQ ID NO: 4166 - DNA, 27 bp, Homo sapiens
  source 1..27: mol_type = other DNA
ctttgaatggtttaacaaaagatttgt

SEQ ID NO: 4167 - DNA, 27 bp, Homo sapiens
  source 1..27: mol_type = other DNA
tttgaatggtttaacaaaagatttgtt

SEQ ID NO: 4168 - DNA, 27 bp, Homo sapiens
  source 1..27: mol_type = other DNA
ttgaatggtttaacaaaagatttgttt

SEQ ID NO: 4169 - DNA, 27 bp, Homo sapiens
  source 1..27: mol_type = other DNA
tgaatggtttaacaaaagatttgtttt

SEQ ID NO: 4170 - DNA, 27 bp, Homo sapiens
  source 1..27: mol_type = other DNA
gaatggtttaacaaaagatttgttttt

SEQ ID NO: 4171 - DNA, 27 bp, Homo sapiens
  source 1..27: mol_type = other DNA
atggtttaacaaaagatttgtttttgt

SEQ ID NO: 4172 - DNA, 27 bp, Homo sapiens
  source 1..27: mol_type = other DNA
tggtttaacaaaagatttgtttttgta

SEQ ID NO: 4173 - DNA, 27 bp, Homo sapiens
  source 1..27: mol_type = other DNA
ttaacaaaagatttgtttttgtagaga

SEQ ID NO: 4174 - DNA, 27 bp, Homo sapiens
  source 1..27: mol_type = other DNA
taacaaaagatttgtttttgtagagat

SEQ ID NO: 4175 - DNA, 27 bp, Homo sapiens
  source 1..27: mol_type = other DNA
aacaaaagatttgtttttgtagagatt

SEQ ID NO: 4176 - DNA, 27 bp, Homo sapiens
  source 1..27: mol_type = other DNA
caaaagatttgtttttgtagagatttt

SEQ ID NO: 4177 - DNA, 27 bp, Homo sapiens
  source 1..27: mol_type = other DNA
aaaagatttgtttttgtagagatttta

SEQ ID NO: 4178 - DNA, 27 bp, Homo sapiens
  source 1..27: mol_type = other DNA
aaagatttgtttttgtagagattttaa

SEQ ID NO: 4179 - DNA, 27 bp, Homo sapiens
  source 1..27: mol_type = other DNA
aagatttgtttttgtagagattttaaa

SEQ ID NO: 4180 - DNA, 27 bp, Homo sapiens
  source 1..27: mol_type = other DNA
tgtttttgtagagattttaaaggggga

SEQ ID NO: 4181 - DNA, 27 bp, Homo sapiens
  source 1..27: mol_type = other DNA
taaagggggagaattctagaaataaat

SEQ ID NO: 4182 - DNA, 27 bp, Homo sapiens
  source 1..27: mol_type = other DNA
aagggggagaattctagaaataaatgt

SEQ ID NO: 4183 - DNA, 27 bp, Homo sapiens
  source 1..27: mol_type = other DNA
agggggagaattctagaaataaatgtt

SEQ ID NO: 4184 - DNA, 27 bp, Homo sapiens
  source 1..27: mol_type = other DNA
gggggagaattctagaaataaatgtta

SEQ ID NO: 4185 - DNA, 27 bp, Homo sapiens
  source 1..27: mol_type = other DNA
ggggagaattctagaaataaatgttac

SEQ ID NO: 4186 - DNA, 27 bp, Homo sapiens
  source 1..27: mol_type = other DNA
gggagaattctagaaataaatgttacc

SEQ ID NO: 4187 - DNA, 27 bp, Homo sapiens
  source 1..27: mol_type = other DNA
aattctagaaataaatgttacctaatt

SEQ ID NO: 4188 - DNA, 27 bp, Homo sapiens
  source 1..27: mol_type = other DNA
attctagaaataaatgttacctaatta

SEQ ID NO: 4189 - DNA, 27 bp, Homo sapiens
  source 1..27: mol_type = other DNA
ttctagaaataaatgttacctaattat

SEQ ID NO: 4190 - DNA, 27 bp, Homo sapiens
  source 1..27: mol_type = other DNA
tctagaaataaatgttacctaattatt

SEQ ID NO: 4191 - DNA, 27 bp, Homo sapiens
  source 1..27: mol_type = other DNA
ctagaaataaatgttacctaattatta

SEQ ID NO: 4192 - DNA, 27 bp, Homo sapiens
  source 1..27: mol_type = other DNA
agaaataaatgttacctaattattaca

SEQ ID NO: 4193 - DNA, 27 bp, Homo sapiens
  source 1..27: mol_type = other DNA
ttacctaattattacagccttaaagac

SEQ ID NO: 4194 - DNA, 27 bp, Homo sapiens
  source 1..27: mol_type = other DNA
tacctaattattacagccttaaagaca

SEQ ID NO: 4195 - DNA, 27 bp, Homo sapiens
  source 1..27: mol_type = other DNA
agccttaaagacaaaaatccttgttga

SEQ ID NO: 4196 - DNA, 27 bp, Homo sapiens
  source 1..27: mol_type = other DNA
cttaaagacaaaaatccttgttgaagt

SEQ ID NO: 4197 - DNA, 27 bp, Homo sapiens
  source 1..27: mol_type = other DNA
aatccttgttgaagtttttttaaaaaa

SEQ ID NO: 4198 - DNA, 27 bp, Homo sapiens
  source 1..27: mol_type = other DNA
atccttgttgaagtttttttaaaaaaa

SEQ ID NO: 4199 - DNA, 27 bp, Homo sapiens
  source 1..27: mol_type = other DNA
ccttgttgaagtttttttaaaaaaagc

SEQ ID NO: 4200 - DNA, 27 bp, Homo sapiens
  source 1..27: mol_type = other DNA
cttgttgaagtttttttaaaaaaagct

SEQ ID NO: 4201 - DNA, 27 bp, Homo sapiens
  source 1..27: mol_type = other DNA
ttgaagtttttttaaaaaaagctaaat

SEQ ID NO: 4202 - DNA, 27 bp, Homo sapiens
  source 1..27: mol_type = other DNA
tgaagtttttttaaaaaaagctaaatt

SEQ ID NO: 4203 - DNA, 27 bp, Homo sapiens
  source 1..27: mol_type = other DNA
gaagtttttttaaaaaaagctaaatta

SEQ ID NO: 4204 - DNA, 27 bp, Homo sapiens
  source 1..27: mol_type = other DNA
aagtttttttaaaaaaagctaaattac

SEQ ID NO: 4205 - DNA, 27 bp, Homo sapiens
  source 1..27: mol_type = other DNA
agtttttttaaaaaaagctaaattaca

SEQ ID NO: 4206 - DNA, 27 bp, Homo sapiens
  source 1..27: mol_type = other DNA
tttttaaaaaaagctaaattacataga

SEQ ID NO: 4207 - DNA, 27 bp, Homo sapiens
  source 1..27: mol_type = other DNA
tttaaaaaaagctaaattacatagact

SEQ ID NO: 4208 - DNA, 27 bp, Homo sapiens
  source 1..27: mol_type = other DNA
agacttaggcattaacatgtttgtgga

SEQ ID NO: 4209 - DNA, 27 bp, Homo sapiens
  source 1..27: mol_type = other DNA
gacttaggcattaacatgtttgtggaa

SEQ ID NO: 4210 - DNA, 27 bp, Homo sapiens
  source 1..27: mol_type = other DNA
atagcagacgtatattgtatcatttga

SEQ ID NO: 4211 - DNA, 27 bp, Homo sapiens
  source 1..27: mol_type = other DNA
cagacgtatattgtatcatttgagtga

SEQ ID NO: 4212 - DNA, 27 bp, Homo sapiens
  source 1..27: mol_type = other DNA
gacgtatattgtatcatttgagtgaat

SEQ ID NO: 4213 - DNA, 27 bp, Homo sapiens
  source 1..27: mol_type = other DNA
gtatattgtatcatttgagtgaatgtt

SEQ ID NO: 4214 - DNA, 27 bp, Homo sapiens
  source 1..27: mol_type = other DNA
tatattgtatcatttgagtgaatgttc

SEQ ID NO: 4215 - DNA, 27 bp, Homo sapiens
  source 1..27: mol_type = other DNA
atattgtatcatttgagtgaatgttcc

SEQ ID NO: 4216 - DNA, 27 bp, Homo sapiens
  source 1..27: mol_type = other DNA
gcataggaatttagaacctaactttta

SEQ ID NO: 4217 - DNA, 27 bp, Homo sapiens
  source 1..27: mol_type = other DNA
cataggaatttagaacctaacttttat

SEQ ID NO: 4218 - DNA, 27 bp, Homo sapiens
  source 1..27: mol_type = other DNA
ggaatttagaacctaacttttataggt

SEQ ID NO: 4219 - DNA, 27 bp, Homo sapiens
  source 1..27: mol_type = other DNA
gaatttagaacctaacttttataggtt

SEQ ID NO: 4220 - DNA, 27 bp, Homo sapiens
  source 1..27: mol_type = other DNA
aatttagaacctaacttttataggtta

SEQ ID NO: 4221 - DNA, 27 bp, Homo sapiens
  source 1..27: mol_type = other DNA
atttagaacctaacttttataggttat

SEQ ID NO: 4222 - DNA, 27 bp, Homo sapiens
  source 1..27: mol_type = other DNA
acttttataggttatcaaaactgttgt

SEQ ID NO: 4223 - DNA, 27 bp, Homo sapiens
  source 1..27: mol_type = other DNA
ttttataggttatcaaaactgttgtca

SEQ ID NO: 4224 - DNA, 27 bp, Homo sapiens
  source 1..27: mol_type = other DNA
acaattttgtcctaatatatacataga

SEQ ID NO: 4225 - DNA, 27 bp, Homo sapiens
  source 1..27: mol_type = other DNA
caattttgtcctaatatatacatagaa

SEQ ID NO: 4226 - DNA, 27 bp, Homo sapiens
  source 1..27: mol_type = other DNA
aattttgtcctaatatatacatagaaa

SEQ ID NO: 4227 - DNA, 27 bp, Homo sapiens
  source 1..27: mol_type = other DNA
gtcctaatatatacatagaaactttgt

SEQ ID NO: 4228 - DNA, 27 bp, Homo sapiens
  source 1..27: mol_type = other DNA
aatatatacatagaaactttgtggggc

SEQ ID NO: 4229 - DNA, 27 bp, Homo sapiens
  source 1..27: mol_type = other DNA
tgcacaagttcatctcatttgtattcc

SEQ ID NO: 4230 - DNA, 27 bp, Homo sapiens
  source 1..27: mol_type = other DNA
atctcatttgtattccattgatttttt

SEQ ID NO: 4231 - DNA, 27 bp, Homo sapiens
  source 1..27: mol_type = other DNA
tctcatttgtattccattgattttttt

SEQ ID NO: 4232 - DNA, 27 bp, Homo sapiens
  source 1..27: mol_type = other DNA
ctcatttgtattccattgatttttttt

SEQ ID NO: 4233 - DNA, 27 bp, Homo sapiens
  source 1..27: mol_type = other DNA
tcatttgtattccattgattttttttt

SEQ ID NO: 4234 - DNA, 27 bp, Homo sapiens
  source 1..27: mol_type = other DNA
catttgtattccattgatttttttttt

SEQ ID NO: 4235 - DNA, 27 bp, Homo sapiens
  source 1..27: mol_type = other DNA
atttgtattccattgattttttttttc

SEQ ID NO: 4236 - DNA, 27 bp, Homo sapiens
  source 1..27: mol_type = other DNA
tttgtattccattgattttttttttct

SEQ ID NO: 4237 - DNA, 27 bp, Homo sapiens
  source 1..27: mol_type = other DNA
tccattgattttttttttcttctaaac

SEQ ID NO: 4238 - DNA, 27 bp, Homo sapiens
  source 1..27: mol_type = other DNA
ccattgattttttttttcttctaaaca

SEQ ID NO: 4239 - DNA, 27 bp, Homo sapiens
  source 1..27: mol_type = other DNA
tgattttttttttcttctaaacatttt

SEQ ID NO: 4240 - DNA, 27 bp, Homo sapiens
  source 1..27: mol_type = other DNA
gattttttttttcttctaaacattttt

SEQ ID NO: 4241 - DNA, 27 bp, Homo sapiens
  source 1..27: mol_type = other DNA
attttttttttcttctaaacatttttt

SEQ ID NO: 4242 - DNA, 27 bp, Homo sapiens
  source 1..27: mol_type = other DNA
ttttttttttcttctaaacattttttc

SEQ ID NO: 4243 - DNA, 27 bp, Homo sapiens
  source 1..27: mol_type = other DNA
tttttttttcttctaaacattttttct

SEQ ID NO: 4244 - DNA, 27 bp, Homo sapiens
  source 1..27: mol_type = other DNA
taaacattttttcttcaaacagtatat

SEQ ID NO: 4245 - DNA, 27 bp, Homo sapiens
  source 1..27: mol_type = other DNA
aaacattttttcttcaaacagtatata

SEQ ID NO: 4246 - DNA, 27 bp, Homo sapiens
  source 1..27: mol_type = other DNA
aacattttttcttcaaacagtatataa

SEQ ID NO: 4247 - DNA, 27 bp, Homo sapiens
  source 1..27: mol_type = other DNA
acattttttcttcaaacagtatataac

SEQ ID NO: 4248 - DNA, 27 bp, Homo sapiens
  source 1..27: mol_type = other DNA
cattttttcttcaaacagtatataact

SEQ ID NO: 4249 - DNA, 27 bp, Homo sapiens
  source 1..27: mol_type = other DNA
tcttcaaacagtatataacttttttta

SEQ ID NO: 4250 - DNA, 27 bp, Homo sapiens
  source 1..27: mol_type = other DNA
aaacagtatataactttttttagggga

SEQ ID NO: 4251 - DNA, 27 bp, Homo sapiens
  source 1..27: mol_type = other DNA
aacagtatataactttttttaggggat

SEQ ID NO: 4252 - DNA, 27 bp, Homo sapiens
  source 1..27: mol_type = other DNA
acagtatataactttttttaggggatt

SEQ ID NO: 4253 - DNA, 27 bp, Homo sapiens
  source 1..27: mol_type = other DNA
cagtatataactttttttaggggattt

SEQ ID NO: 4254 - DNA, 27 bp, Homo sapiens
  source 1..27: mol_type = other DNA
ataactttttttaggggattttttttt

SEQ ID NO: 4255 - DNA, 27 bp, Homo sapiens
  source 1..27: mol_type = other DNA
taactttttttaggggattttttttta

SEQ ID NO: 4256 - DNA, 27 bp, Homo sapiens
  source 1..27: mol_type = other DNA
aggggatttttttttagacagcaaaaa

SEQ ID NO: 4257 - DNA, 27 bp, Homo sapiens
  source 1..27: mol_type = other DNA
ggggatttttttttagacagcaaaaac

SEQ ID NO: 4258 - DNA, 27 bp, Homo sapiens
  source 1..27: mol_type = other DNA
gggatttttttttagacagcaaaaact

SEQ ID NO: 4259 - DNA, 27 bp, Homo sapiens
  source 1..27: mol_type = other DNA
tctgaagatttccatttgtcaaaaagt

SEQ ID NO: 4260 - DNA, 27 bp, Homo sapiens
  source 1..27: mol_type = other DNA
ctgaagatttccatttgtcaaaaagta

SEQ ID NO: 4261 - DNA, 27 bp, Homo sapiens
  source 1..27: mol_type = other DNA
tgaagatttccatttgtcaaaaagtaa

SEQ ID NO: 4262 - DNA, 27 bp, Homo sapiens
  source 1..27: mol_type = other DNA
gaagatttccatttgtcaaaaagtaat

SEQ ID NO: 4263 - DNA, 27 bp, Homo sapiens
  source 1..27: mol_type = other DNA
tttccatttgtcaaaaagtaatgattt

SEQ ID NO: 4264 - DNA, 27 bp, Homo sapiens
  source 1..27: mol_type = other DNA
ttccatttgtcaaaaagtaatgatttc

SEQ ID NO: 4265 - DNA, 27 bp, Homo sapiens
  source 1..27: mol_type = other DNA
tccatttgtcaaaaagtaatgatttct

SEQ ID NO: 4266 - DNA, 27 bp, Homo sapiens
  source 1..27: mol_type = other DNA
ttgtcaaaaagtaatgatttcttgata

SEQ ID NO: 4267 - DNA, 27 bp, Homo sapiens
  source 1..27: mol_type = other DNA
tgtcaaaaagtaatgatttcttgataa

SEQ ID NO: 4268 - DNA, 27 bp, Homo sapiens
  source 1..27: mol_type = other DNA
gtcaaaaagtaatgatttcttgataat

SEQ ID NO: 4269 - DNA, 27 bp, Homo sapiens
  source 1..27: mol_type = other DNA
tcaaaaagtaatgatttcttgataatt

SEQ ID NO: 4270 - DNA, 27 bp, Homo sapiens
  source 1..27: mol_type = other DNA
aaaaagtaatgatttcttgataattgt

SEQ ID NO: 4271 - DNA, 27 bp, Homo sapiens
  source 1..27: mol_type = other DNA
aaagtaatgatttcttgataattgtgt

SEQ ID NO: 4272 - DNA, 27 bp, Homo sapiens
  source 1..27: mol_type = other DNA
aagtaatgatttcttgataattgtgta

SEQ ID NO: 4273 - DNA, 27 bp, Homo sapiens
  source 1..27: mol_type = other DNA
gtaatgatttcttgataattgtgtagt

SEQ ID NO: 4274 - DNA, 27 bp, Homo sapiens
  source 1..27: mol_type = other DNA
taatgatttcttgataattgtgtagta

SEQ ID NO: 4275 - DNA, 27 bp, Homo sapiens
  source 1..27: mol_type = other DNA
atttcttgataattgtgtagtaatgtt

SEQ ID NO: 4276 - DNA, 27 bp, Homo sapiens
  source 1..27: mol_type = other DNA
tttcttgataattgtgtagtaatgttt

SEQ ID NO: 4277 - DNA, 27 bp, Homo sapiens
  source 1..27: mol_type = other DNA
ttcttgataattgtgtagtaatgtttt

SEQ ID NO: 4278 - DNA, 27 bp, Homo sapiens
  source 1..27: mol_type = other DNA
cttgataattgtgtagtaatgtttttt

SEQ ID NO: 4279 - DNA, 27 bp, Homo sapiens
  source 1..27: mol_type = other DNA
gataattgtgtagtaatgttttttaga

SEQ ID NO: 4280 - DNA, 27 bp, Homo sapiens
  source 1..27: mol_type = other DNA
taattgtgtagtaatgttttttagaac

SEQ ID NO: 4281 - DNA, 27 bp, Homo sapiens
  source 1..27: mol_type = other DNA
aattgtgtagtaatgttttttagaacc

SEQ ID NO: 4282 - DNA, 27 bp, Homo sapiens
  source 1..27: mol_type = other DNA
taccttaaagctgaatttatatttagt

SEQ ID NO: 4283 - DNA, 27 bp, Homo sapiens
  source 1..27: mol_type = other DNA
ccttaaagctgaatttatatttagtaa

SEQ ID NO: 4284 - DNA, 27 bp, Homo sapiens
  source 1..27: mol_type = other DNA
tgaatttatatttagtaacttctgtgt

SEQ ID NO: 4285 - DNA, 27 bp, Homo sapiens
  source 1..27: mol_type = other DNA
gaatttatatttagtaacttctgtgtt

SEQ ID NO: 4286 - DNA, 27 bp, Homo sapiens
  source 1..27: mol_type = other DNA
aatttatatttagtaacttctgtgtta

SEQ ID NO: 4287 - DNA, 27 bp, Homo sapiens
  source 1..27: mol_type = other DNA
atatttagtaacttctgtgttaatact

SEQ ID NO: 4288 - DNA, 27 bp, Homo sapiens
  source 1..27: mol_type = other DNA
aaactgaatagctgtcataaaatgaaa

SEQ ID NO: 4289 - DNA, 27 bp, Homo sapiens
  source 1..27: mol_type = other DNA
aactgaatagctgtcataaaatgaaac

SEQ ID NO: 4290 - DNA, 27 bp, Homo sapiens
  source 1..27: mol_type = other DNA
cataaaatgaaactttctttctaaaga

SEQ ID NO: 4291 - DNA, 27 bp, Homo sapiens
  source 1..27: mol_type = other DNA
ataaaatgaaactttctttctaaagaa

SEQ ID NO: 4292 - DNA, 27 bp, Homo sapiens
  source 1..27: mol_type = other DNA
taaaatgaaactttctttctaaagaaa

SEQ ID NO: 4293 - DNA, 27 bp, Homo sapiens
  source 1..27: mol_type = other DNA
aaatgaaactttctttctaaagaaaga

SEQ ID NO: 4294 - DNA, 27 bp, Homo sapiens
  source 1..27: mol_type = other DNA
gaaactttctttctaaagaaagatact

SEQ ID NO: 4295 - DNA, 27 bp, Homo sapiens
  source 1..27: mol_type = other DNA
ctcacatgagttcttgaagaatagtca

SEQ ID NO: 4296 - DNA, 27 bp, Homo sapiens
  source 1..27: mol_type = other DNA
gttcttgaagaatagtcataactagat

SEQ ID NO: 4297 - DNA, 27 bp, Homo sapiens
  source 1..27: mol_type = other DNA
ttcttgaagaatagtcataactagatt

SEQ ID NO: 4298 - DNA, 27 bp, Homo sapiens
  source 1..27: mol_type = other DNA
tcttgaagaatagtcataactagatta

SEQ ID NO: 4299 - DNA, 27 bp, Homo sapiens
  source 1..27: mol_type = other DNA
tgaagaatagtcataactagattaaga

SEQ ID NO: 4300 - DNA, 27 bp, Homo sapiens
  source 1..27: mol_type = other DNA
gaagaatagtcataactagattaagat

SEQ ID NO: 4301 - DNA, 27 bp, Homo sapiens
  source 1..27: mol_type = other DNA
aagaatagtcataactagattaagatc

SEQ ID NO: 4302 - DNA, 27 bp, Homo sapiens
  source 1..27: mol_type = other DNA
agaatagtcataactagattaagatct

SEQ ID NO: 4303 - DNA, 27 bp, Homo sapiens
  source 1..27: mol_type = other DNA
tagtcataactagattaagatctgtgt

SEQ ID NO: 4304 - DNA, 27 bp, Homo sapiens
  source 1..27: mol_type = other DNA
taactagattaagatctgtgttttagt

SEQ ID NO: 4305 - DNA, 27 bp, Homo sapiens
  source 1..27: mol_type = other DNA
actagattaagatctgtgttttagttt

SEQ ID NO: 4306 - DNA, 27 bp, Homo sapiens
  source 1..27: mol_type = other DNA
ctagattaagatctgtgttttagttta

SEQ ID NO: 4307 - DNA, 27 bp, Homo sapiens
  source 1..27: mol_type = other DNA
agattaagatctgtgttttagtttaat

SEQ ID NO: 4308 - DNA, 27 bp, Homo sapiens
  source 1..27: mol_type = other DNA
gatctgtgttttagtttaatagtttga

SEQ ID NO: 4309 - DNA, 27 bp, Homo sapiens
  source 1..27: mol_type = other DNA
atctgtgttttagtttaatagtttgaa

SEQ ID NO: 4310 - DNA, 27 bp, Homo sapiens
  source 1..27: mol_type = other DNA
ctgtgttttagtttaatagtttgaagt

SEQ ID NO: 4311 - DNA, 27 bp, Homo sapiens
  source 1..27: mol_type = other DNA
gtgttttagtttaatagtttgaagtgc

SEQ ID NO: 4312 - DNA, 27 bp, Homo sapiens
  source 1..27: mol_type = other DNA
tgttttagtttaatagtttgaagtgcc

SEQ ID NO: 4313 - DNA, 27 bp, Homo sapiens
  source 1..27: mol_type = other DNA
ctgtttgggataatgataggtaattta

SEQ ID NO: 4314 - DNA, 27 bp, Homo sapiens
  source 1..27: mol_type = other DNA
gtttgggataatgataggtaatttaga

SEQ ID NO: 4315 - DNA, 27 bp, Homo sapiens
  source 1..27: mol_type = other DNA
tgggataatgataggtaatttagatga

SEQ ID NO: 4316 - DNA, 27 bp, Homo sapiens
  source 1..27: mol_type = other DNA
gggataatgataggtaatttagatgaa

SEQ ID NO: 4317 - DNA, 27 bp, Homo sapiens
  source 1..27: mol_type = other DNA
ataatgataggtaatttagatgaattt

SEQ ID NO: 4318 - DNA, 27 bp, Homo sapiens
  source 1..27: mol_type = other DNA
taatgataggtaatttagatgaattta

SEQ ID NO: 4319 - DNA, 27 bp, Homo sapiens
  source 1..27: mol_type = other DNA
ataggtaatttagatgaatttagggga

SEQ ID NO: 4320 - DNA, 27 bp, Homo sapiens
  source 1..27: mol_type = other DNA
aggtaatttagatgaatttaggggaaa

SEQ ID NO: 4321 - DNA, 27 bp, Homo sapiens
  source 1..27: mol_type = other DNA
ttagatgaatttaggggaaaaaaaagt

SEQ ID NO: 4322 - DNA, 27 bp, Homo sapiens
  source 1..27: mol_type = other DNA
tagatgaatttaggggaaaaaaaagtt

SEQ ID NO: 4323 - DNA, 27 bp, Homo sapiens
  source 1..27: mol_type = other DNA
aggggaaaaaaaagttatctgcagata

SEQ ID NO: 4324 - DNA, 27 bp, Homo sapiens
  source 1..27: mol_type = other DNA
ggggaaaaaaaagttatctgcagatat

SEQ ID NO: 4325 - DNA, 27 bp, Homo sapiens
  source 1..27: mol_type = other DNA
aaaaaaagttatctgcagatatgttga

SEQ ID NO: 4326 - DNA, 27 bp, Homo sapiens
  source 1..27: mol_type = other DNA
ctgtcttgtgttttcatgttgaaaata

SEQ ID NO: 4327 - DNA, 27 bp, Homo sapiens
  source 1..27: mol_type = other DNA
tgtcttgtgttttcatgttgaaaatac

SEQ ID NO: 4328 - DNA, 27 bp, Homo sapiens
  source 1..27: mol_type = other DNA
gtcttgtgttttcatgttgaaaatact

SEQ ID NO: 4329 - DNA, 27 bp, Homo sapiens
  source 1..27: mol_type = other DNA
ttcatgttgaaaatacttttgcatttt

SEQ ID NO: 4330 - DNA, 27 bp, Homo sapiens
  source 1..27: mol_type = other DNA
tcatgttgaaaatacttttgcattttt

SEQ ID NO: 4331 - DNA, 27 bp, Homo sapiens
  source 1..27: mol_type = other DNA
catgttgaaaatacttttgcatttttc

SEQ ID NO: 4332 - DNA, 27 bp, Homo sapiens
  source 1..27: mol_type = other DNA
atgttgaaaatacttttgcatttttcc

SEQ ID NO: 4333 - DNA, 27 bp, Homo sapiens
  source 1..27: mol_type = other DNA
tacttttgcatttttcctttgagtgcc

SEQ ID NO: 4334 - DNA, 27 bp, Homo sapiens
  source 1..27: mol_type = other DNA
tttgagtgccaatttcttactagtact

SEQ ID NO: 4335 - DNA, 27 bp, Homo sapiens
  source 1..27: mol_type = other DNA
gtgccaatttcttactagtactatttc

SEQ ID NO: 4336 - DNA, 27 bp, Homo sapiens
  source 1..27: mol_type = other DNA
tgccaatttcttactagtactatttct

SEQ ID NO: 4337 - DNA, 27 bp, Homo sapiens
  source 1..27: mol_type = other DNA
cttactagtactatttcttaatgtaac

SEQ ID NO: 4338 - DNA, 27 bp, Homo sapiens
  source 1..27: mol_type = other DNA
ttactagtactatttcttaatgtaaca

SEQ ID NO: 4339 - DNA, 27 bp, Homo sapiens
  source 1..27: mol_type = other DNA
agtactatttcttaatgtaacatgttt

SEQ ID NO: 4340 - DNA, 27 bp, Homo sapiens
  source 1..27: mol_type = other DNA
gtactatttcttaatgtaacatgttta

SEQ ID NO: 4341 - DNA, 27 bp, Homo sapiens
  source 1..27: mol_type = other DNA
tactatttcttaatgtaacatgtttac

SEQ ID NO: 4342 - DNA, 27 bp, Homo sapiens
  source 1..27: mol_type = other DNA
tcttaatgtaacatgtttacctggaat

SEQ ID NO: 4343 - DNA, 27 bp, Homo sapiens
  source 1..27: mol_type = other DNA
tacctggaatgtattttaactattttt

SEQ ID NO: 4344 - DNA, 27 bp, Homo sapiens
  source 1..27: mol_type = other DNA
cctggaatgtattttaactatttttgt

SEQ ID NO: 4345 - DNA, 27 bp, Homo sapiens
  source 1..27: mol_type = other DNA
ctggaatgtattttaactatttttgta

SEQ ID NO: 4346 - DNA, 27 bp, Homo sapiens
  source 1..27: mol_type = other DNA
tggaatgtattttaactatttttgtat

SEQ ID NO: 4347 - DNA, 27 bp, Homo sapiens
  source 1..27: mol_type = other DNA
ggaatgtattttaactatttttgtata

SEQ ID NO: 4348 - DNA, 27 bp, Homo sapiens
  source 1..27: mol_type = other DNA
aatgtattttaactatttttgtatagt

SEQ ID NO: 4349 - DNA, 27 bp, Homo sapiens
  source 1..27: mol_type = other DNA
tgtattttaactatttttgtatagtgt

SEQ ID NO: 4350 - DNA, 27 bp, Homo sapiens
  source 1..27: mol_type = other DNA
gtattttaactatttttgtatagtgta

SEQ ID NO: 4351 - DNA, 27 bp, Homo sapiens
  source 1..27: mol_type = other DNA
tattttaactatttttgtatagtgtaa

SEQ ID NO: 4352 - DNA, 27 bp, Homo sapiens
  source 1..27: mol_type = other DNA
actatttttgtatagtgtaaactgaaa

SEQ ID NO: 4353 - DNA, 27 bp, Homo sapiens
  source 1..27: mol_type = other DNA
ctatttttgtatagtgtaaactgaaac

SEQ ID NO: 4354 - DNA, 27 bp, Homo sapiens
  source 1..27: mol_type = other DNA
tatttttgtatagtgtaaactgaaaca

SEQ ID NO: 4355 - DNA, 27 bp, Homo sapiens
  source 1..27: mol_type = other DNA
taaactgaaacatgcacattttgtaca

SEQ ID NO: 4356 - DNA, 27 bp, Homo sapiens
  source 1..27: mol_type = other DNA
gaaacatgcacattttgtacattgtgc

SEQ ID NO: 4357 - DNA, 27 bp, Homo sapiens
  source 1..27: mol_type = other DNA
gatccagttgttttccatcatttggtt

SEQ ID NO: 4358 - DNA, 27 bp, Homo sapiens
  source 1..27: mol_type = other DNA
tccagttgttttccatcatttggttgc

SEQ ID NO: 4359 - DNA, 27 bp, Homo sapiens
  source 1..27: mol_type = other DNA
gaatgttggtcatatcaaacattaaaa

SEQ ID NO: 4360 - DNA, 27 bp, Homo sapiens
  source 1..27: mol_type = other DNA
aatgttggtcatatcaaacattaaaaa

SEQ ID NO: 4361 - DNA, 27 bp, Homo sapiens
  source 1..27: mol_type = other DNA
atgttggtcatatcaaacattaaaaat

SEQ ID NO: 4362 - DNA, 27 bp, Homo sapiens
  source 1..27: mol_type = other DNA
tggtcatatcaaacattaaaaatgacc

SEQ ID NO: 4363 - DNA, 27 bp, Homo sapiens
  source 1..27: mol_type = other DNA
taaaaatgaccactcttttaattgaaa

SEQ ID NO: 4364 - DNA, 27 bp, Homo sapiens
  source 1..27: mol_type = other DNA
aaaaatgaccactcttttaattgaaat

SEQ ID NO: 4365 - DNA, 27 bp, Homo sapiens
  source 1..27: mol_type = other DNA
cactcttttaattgaaattaactttta

SEQ ID NO: 4366 - DNA, 27 bp, Homo sapiens
  source 1..27: mol_type = other DNA
actcttttaattgaaattaacttttaa

SEQ ID NO: 4367 - DNA, 27 bp, Homo sapiens
  source 1..27: mol_type = other DNA
tcttttaattgaaattaacttttaaat

SEQ ID NO: 4368 - DNA, 27 bp, Homo sapiens
  source 1..27: mol_type = other DNA
ttttaattgaaattaacttttaaatgt

SEQ ID NO: 4369 - DNA, 27 bp, Homo sapiens
  source 1..27: mol_type = other DNA
tttaattgaaattaacttttaaatgtt

SEQ ID NO: 4370 - DNA, 27 bp, Homo sapiens
  source 1..27: mol_type = other DNA
ttaattgaaattaacttttaaatgttt

SEQ ID NO: 4371 - DNA, 27 bp, Homo sapiens
  source 1..27: mol_type = other DNA
taattgaaattaacttttaaatgttta

SEQ ID NO: 4372 - DNA, 27 bp, Homo sapiens
  source 1..27: mol_type = other DNA
aattgaaattaacttttaaatgtttat

SEQ ID NO: 4373 - DNA, 27 bp, Homo sapiens
  source 1..27: mol_type = other DNA
attgaaattaacttttaaatgtttata

SEQ ID NO: 4374 - DNA, 27 bp, Homo sapiens
  source 1..27: mol_type = other DNA
gaaattaacttttaaatgtttatagga

SEQ ID NO: 4375 - DNA, 27 bp, Homo sapiens
  source 1..27: mol_type = other DNA
ttaacttttaaatgtttataggagtat

SEQ ID NO: 4376 - DNA, 27 bp, Homo sapiens
  source 1..27: mol_type = other DNA
cttttaaatgtttataggagtatgtgc

SEQ ID NO: 4377 - DNA, 27 bp, Homo sapiens
  source 1..27: mol_type = other DNA
ttttaaatgtttataggagtatgtgct

SEQ ID NO: 4378 - DNA, 27 bp, Homo sapiens
  source 1..27: mol_type = other DNA
gtgctgtgaagtgatctaaaatttgta

SEQ ID NO: 4379 - DNA, 27 bp, Homo sapiens
  source 1..27: mol_type = other DNA
gctgtgaagtgatctaaaatttgtaat

SEQ ID NO: 4380 - DNA, 27 bp, Homo sapiens
  source 1..27: mol_type = other DNA
ctgtgaagtgatctaaaatttgtaata

SEQ ID NO: 4381 - DNA, 27 bp, Homo sapiens
  source 1..27: mol_type = other DNA
tgtgaagtgatctaaaatttgtaatat

SEQ ID NO: 4382 - DNA, 27 bp, Homo sapiens
  source 1..27: mol_type = other DNA
gtgaagtgatctaaaatttgtaatatt

SEQ ID NO: 4383 - DNA, 27 bp, Homo sapiens
  source 1..27: mol_type = other DNA
tgaagtgatctaaaatttgtaatattt

SEQ ID NO: 4384 - DNA, 27 bp, Homo sapiens
  source 1..27: mol_type = other DNA
gaagtgatctaaaatttgtaatatttt

SEQ ID NO: 4385 - DNA, 27 bp, Homo sapiens
  source 1..27: mol_type = other DNA
tgatctaaaatttgtaatatttttgtc

SEQ ID NO: 4386 - DNA, 27 bp, Homo sapiens
  source 1..27: mol_type = other DNA
gatctaaaatttgtaatatttttgtca

SEQ ID NO: 4387 - DNA, 27 bp, Homo sapiens
  source 1..27: mol_type = other DNA
taaaatttgtaatatttttgtcatgaa

SEQ ID NO: 4388 - DNA, 27 bp, Homo sapiens
  source 1..27: mol_type = other DNA
aaaatttgtaatatttttgtcatgaac

SEQ ID NO: 4389 - DNA, 27 bp, Homo sapiens
  source 1..27: mol_type = other DNA
aaatttgtaatatttttgtcatgaact

SEQ ID NO: 4390 - DNA, 27 bp, Homo sapiens
  source 1..27: mol_type = other DNA
ttgtaatatttttgtcatgaactgtac

SEQ ID NO: 4391 - DNA, 27 bp, Homo sapiens
  source 1..27: mol_type = other DNA
tgtaatatttttgtcatgaactgtact

SEQ ID NO: 4392 - DNA, 27 bp, Homo sapiens
  source 1..27: mol_type = other DNA
tgaactgtactactcctaattattgta

SEQ ID NO: 4393 - DNA, 27 bp, Homo sapiens
  source 1..27: mol_type = other DNA
gaactgtactactcctaattattgtaa

SEQ ID NO: 4394 - DNA, 27 bp, Homo sapiens
  source 1..27: mol_type = other DNA
actcctaattattgtaatgtaataaaa

SEQ ID NO: 4395 - DNA, 27 bp, Homo sapiens
  source 1..27: mol_type = other DNA
ctcctaattattgtaatgtaataaaaa

SEQ ID NO: 4396 - DNA, 27 bp, Homo sapiens
  source 1..27: mol_type = other DNA
cctaattattgtaatgtaataaaaata

SEQ ID NO: 4397 - DNA, 27 bp, Homo sapiens
  source 1..27: mol_type = other DNA
taattattgtaatgtaataaaaatagt

SEQ ID NO: 4398 - DNA, 27 bp, Homo sapiens
  source 1..27: mol_type = other DNA
aattattgtaatgtaataaaaatagtt

SEQ ID NO: 4399 - DNA, 27 bp, Homo sapiens
  source 1..27: mol_type = other DNA
ttattgtaatgtaataaaaatagttac

SEQ ID NO: 4400 - DNA, 27 bp, Homo sapiens
  source 1..27: mol_type = other DNA
tattgtaatgtaataaaaatagttaca

SEQ ID NO: 4401 - DNA, 27 bp, Homo sapiens
  source 1..27: mol_type = other DNA
gtaatgtaataaaaatagttacagtga

SEQ ID NO: 4402 - DNA, 27 bp, Homo sapiens
  source 1..27: mol_type = other DNA
taatgtaataaaaatagttacagtgac

SEQ ID NO: 4403 - DNA, 27 bp, Homo sapiens
  source 1..27: mol_type = other DNA
aatgtaataaaaatagttacagtgaca

SEQ ID NO: 4404 - DNA, 27 bp, Homo sapiens
  source 1..27: mol_type = other DNA
aaaaatagttacagtgacaaaaaaaaa

SEQ ID NO: 4405 - DNA, 27 bp, Homo sapiens
  source 1..27: mol_type = other DNA
aaaatagttacagtgacaaaaaaaaaa

SEQ ID NO: 4406 - DNA, 27 bp, Homo sapiens
  source 1..27: mol_type = other DNA
aatagttacagtgacaaaaaaaaaaaa

SEQ ID NO: 4407 - RNA, 27 nt, synthetic construct
  misc_feature 1..27: note = Description of Artificial Sequence: Syntheticoligonucleotide
  source 1..27: mol_type = other RNA
tattcagtcattttcagcaggcctctc

SEQ ID NO: 4408 - RNA, 27 nt, synthetic construct
  misc_feature 1..27: note = Description of Artificial Sequence: Syntheticoligonucleotide
  source 1..27: mol_type = other RNA
atattcagtcattttcagcaggcctct

SEQ ID NO: 4409 - RNA, 27 nt, synthetic construct
  misc_feature 1..27: note = Description of Artificial Sequence: Syntheticoligonucleotide
  source 1..27: mol_type = other RNA
tatattcagtcattttcagcaggcctc

SEQ ID NO: 4410 - RNA, 27 nt, synthetic construct
  misc_feature 1..27: note = Description of Artificial Sequence: Syntheticoligonucleotide
  source 1..27: mol_type = other RNA
ttatattcagtcattttcagcaggcct

SEQ ID NO: 4411 - RNA, 27 nt, synthetic construct
  misc_feature 1..27: note = Description of Artificial Sequence: Syntheticoligonucleotide
  source 1..27: mol_type = other RNA
tcttgcctacgccaccagctccaacta

SEQ ID NO: 4412 - RNA, 27 nt, synthetic construct
  misc_feature 1..27: note = Description of Artificial Sequence: Syntheticoligonucleotide
  source 1..27: mol_type = other RNA
ctcttgcctacgccaccagctccaact

SEQ ID NO: 4413 - RNA, 27 nt, synthetic construct
  misc_feature 1..27: note = Description of Artificial Sequence: Syntheticoligonucleotide
  source 1..27: mol_type = other RNA
actcttgcctacgccaccagctccaac

SEQ ID NO: 4414 - RNA, 27 nt, synthetic construct
  misc_feature 1..27: note = Description of Artificial Sequence: Syntheticoligonucleotide
  source 1..27: mol_type = other RNA
cactcttgcctacgccaccagctccaa

SEQ ID NO: 4415 - RNA, 27 nt, synthetic construct
  misc_feature 1..27: note = Description of Artificial Sequence: Syntheticoligonucleotide
  source 1..27: mol_type = other RNA
gcactcttgcctacgccaccagctcca

SEQ ID NO: 4416 - RNA, 27 nt, synthetic construct
  misc_feature 1..27: note = Description of Artificial Sequence: Syntheticoligonucleotide
  source 1..27: mol_type = other RNA
ggcactcttgcctacgccaccagctcc

SEQ ID NO: 4417 - RNA, 27 nt, synthetic construct
  misc_feature 1..27: note = Description of Artificial Sequence: Syntheticoligonucleotide
  source 1..27: mol_type = other RNA
aggcactcttgcctacgccaccagctc

SEQ ID NO: 4418 - RNA, 27 nt, synthetic construct
  misc_feature 1..27: note = Description of Artificial Sequence: Syntheticoligonucleotide
  source 1..27: mol_type = other RNA
acaaaatgattctgaattagctgtatc

SEQ ID NO: 4419 - RNA, 27 nt, synthetic construct
  misc_feature 1..27: note = Description of Artificial Sequence: Syntheticoligonucleotide
  source 1..27: mol_type = other RNA
aagagacaggtttctccatcaattact

SEQ ID NO: 4420 - RNA, 27 nt, synthetic construct
  misc_feature 1..27: note = Description of Artificial Sequence: Syntheticoligonucleotide
  source 1..27: mol_type = other RNA
caagagacaggtttctccatcaattac

SEQ ID NO: 4421 - RNA, 27 nt, synthetic construct
  misc_feature 1..27: note = Description of Artificial Sequence: Syntheticoligonucleotide
  source 1..27: mol_type = other RNA
tatccaagagacaggtttctccatcaa

SEQ ID NO: 4422 - RNA, 27 nt, synthetic construct
  misc_feature 1..27: note = Description of Artificial Sequence: Syntheticoligonucleotide
  source 1..27: mol_type = other RNA
gtgtcgagaatatccaagagacaggtt

SEQ ID NO: 4423 - RNA, 27 nt, synthetic construct
  misc_feature 1..27: note = Description of Artificial Sequence: Syntheticoligonucleotide
  source 1..27: mol_type = other RNA
ctgtgtcgagaatatccaagagacagg

SEQ ID NO: 4424 - RNA, 27 nt, synthetic construct
  misc_feature 1..27: note = Description of Artificial Sequence: Syntheticoligonucleotide
  source 1..27: mol_type = other RNA
gctgtgtcgagaatatccaagagacag

SEQ ID NO: 4425 - RNA, 27 nt, synthetic construct
  misc_feature 1..27: note = Description of Artificial Sequence: Syntheticoligonucleotide
  source 1..27: mol_type = other RNA
tgctgtgtcgagaatatccaagagaca

SEQ ID NO: 4426 - RNA, 27 nt, synthetic construct
  misc_feature 1..27: note = Description of Artificial Sequence: Syntheticoligonucleotide
  source 1..27: mol_type = other RNA
ctgctgtgtcgagaatatccaagagac

SEQ ID NO: 4427 - RNA, 27 nt, synthetic construct
  misc_feature 1..27: note = Description of Artificial Sequence: Syntheticoligonucleotide
  source 1..27: mol_type = other RNA
cctgctgtgtcgagaatatccaagaga

SEQ ID NO: 4428 - RNA, 27 nt, synthetic construct
  misc_feature 1..27: note = Description of Artificial Sequence: Syntheticoligonucleotide
  source 1..27: mol_type = other RNA
acctgctgtgtcgagaatatccaagag

SEQ ID NO: 4429 - RNA, 27 nt, synthetic construct
  misc_feature 1..27: note = Description of Artificial Sequence: Syntheticoligonucleotide
  source 1..27: mol_type = other RNA
gacctgctgtgtcgagaatatccaaga

SEQ ID NO: 4430 - RNA, 27 nt, synthetic construct
  misc_feature 1..27: note = Description of Artificial Sequence: Syntheticoligonucleotide
  source 1..27: mol_type = other RNA
gcactgtactcctcttgacctgctgtg

SEQ ID NO: 4431 - RNA, 27 nt, synthetic construct
  misc_feature 1..27: note = Description of Artificial Sequence: Syntheticoligonucleotide
  source 1..27: mol_type = other RNA
tgcactgtactcctcttgacctgctgt

SEQ ID NO: 4432 - RNA, 27 nt, synthetic construct
  misc_feature 1..27: note = Description of Artificial Sequence: Syntheticoligonucleotide
  source 1..27: mol_type = other RNA
ttgcactgtactcctcttgacctgctg

SEQ ID NO: 4433 - RNA, 27 nt, synthetic construct
  misc_feature 1..27: note = Description of Artificial Sequence: Syntheticoligonucleotide
  source 1..27: mol_type = other RNA
tggtccctcattgcactgtactcctct

SEQ ID NO: 4434 - RNA, 27 nt, synthetic construct
  misc_feature 1..27: note = Description of Artificial Sequence: Syntheticoligonucleotide
  source 1..27: mol_type = other RNA
ctggtccctcattgcactgtactcctc

SEQ ID NO: 4435 - RNA, 27 nt, synthetic construct
  misc_feature 1..27: note = Description of Artificial Sequence: Syntheticoligonucleotide
  source 1..27: mol_type = other RNA
actggtccctcattgcactgtactcct

SEQ ID NO: 4436 - RNA, 27 nt, synthetic construct
  misc_feature 1..27: note = Description of Artificial Sequence: Syntheticoligonucleotide
  source 1..27: mol_type = other RNA
tactggtccctcattgcactgtactcc

SEQ ID NO: 4437 - RNA, 27 nt, synthetic construct
  misc_feature 1..27: note = Description of Artificial Sequence: Syntheticoligonucleotide
  source 1..27: mol_type = other RNA
gtactggtccctcattgcactgtactc

SEQ ID NO: 4438 - RNA, 27 nt, synthetic construct
  misc_feature 1..27: note = Description of Artificial Sequence: Syntheticoligonucleotide
  source 1..27: mol_type = other RNA
tgtactggtccctcattgcactgtact

SEQ ID NO: 4439 - RNA, 27 nt, synthetic construct
  misc_feature 1..27: note = Description of Artificial Sequence: Syntheticoligonucleotide
  source 1..27: mol_type = other RNA
atgtactggtccctcattgcactgtac

SEQ ID NO: 4440 - RNA, 27 nt, synthetic construct
  misc_feature 1..27: note = Description of Artificial Sequence: Syntheticoligonucleotide
  source 1..27: mol_type = other RNA
catgtactggtccctcattgcactgta

SEQ ID NO: 4441 - RNA, 27 nt, synthetic construct
  misc_feature 1..27: note = Description of Artificial Sequence: Syntheticoligonucleotide
  source 1..27: mol_type = other RNA
tcatgtactggtccctcattgcactgt

SEQ ID NO: 4442 - RNA, 27 nt, synthetic construct
  misc_feature 1..27: note = Description of Artificial Sequence: Syntheticoligonucleotide
  source 1..27: mol_type = other RNA
atttagtattatttatggcaaatacac

SEQ ID NO: 4443 - RNA, 27 nt, synthetic construct
  misc_feature 1..27: note = Description of Artificial Sequence: Syntheticoligonucleotide
  source 1..27: mol_type = other RNA
gatttagtattatttatggcaaataca

SEQ ID NO: 4444 - RNA, 27 nt, synthetic construct
  misc_feature 1..27: note = Description of Artificial Sequence: Syntheticoligonucleotide
  source 1..27: mol_type = other RNA
tgatttagtattatttatggcaaatac

SEQ ID NO: 4445 - RNA, 27 nt, synthetic construct
  misc_feature 1..27: note = Description of Artificial Sequence: Syntheticoligonucleotide
  source 1..27: mol_type = other RNA
atgatttagtattatttatggcaaata

SEQ ID NO: 4446 - RNA, 27 nt, synthetic construct
  misc_feature 1..27: note = Description of Artificial Sequence: Syntheticoligonucleotide
  source 1..27: mol_type = other RNA
aatgatttagtattatttatggcaaat

SEQ ID NO: 4447 - RNA, 27 nt, synthetic construct
  misc_feature 1..27: note = Description of Artificial Sequence: Syntheticoligonucleotide
  source 1..27: mol_type = other RNA
aaatgatttagtattatttatggcaaa

SEQ ID NO: 4448 - RNA, 27 nt, synthetic construct
  misc_feature 1..27: note = Description of Artificial Sequence: Syntheticoligonucleotide
  source 1..27: mol_type = other RNA
caaatgatttagtattatttatggcaa

SEQ ID NO: 4449 - RNA, 27 nt, synthetic construct
  misc_feature 1..27: note = Description of Artificial Sequence: Syntheticoligonucleotide
  source 1..27: mol_type = other RNA
tgaatatcttcaaatgatttagtatta

SEQ ID NO: 4450 - RNA, 27 nt, synthetic construct
  misc_feature 1..27: note = Description of Artificial Sequence: Syntheticoligonucleotide
  source 1..27: mol_type = other RNA
gtgaatatcttcaaatgatttagtatt

SEQ ID NO: 4451 - RNA, 27 nt, synthetic construct
  misc_feature 1..27: note = Description of Artificial Sequence: Syntheticoligonucleotide
  source 1..27: mol_type = other RNA
ggtgaatatcttcaaatgatttagtat

SEQ ID NO: 4452 - RNA, 27 nt, synthetic construct
  misc_feature 1..27: note = Description of Artificial Sequence: Syntheticoligonucleotide
  source 1..27: mol_type = other RNA
tggtgaatatcttcaaatgatttagta

SEQ ID NO: 4453 - RNA, 27 nt, synthetic construct
  misc_feature 1..27: note = Description of Artificial Sequence: Syntheticoligonucleotide
  source 1..27: mol_type = other RNA
atggtgaatatcttcaaatgatttagt

SEQ ID NO: 4454 - RNA, 27 nt, synthetic construct
  misc_feature 1..27: note = Description of Artificial Sequence: Syntheticoligonucleotide
  source 1..27: mol_type = other RNA
aatggtgaatatcttcaaatgatttag

SEQ ID NO: 4455 - RNA, 27 nt, synthetic construct
  misc_feature 1..27: note = Description of Artificial Sequence: Syntheticoligonucleotide
  source 1..27: mol_type = other RNA
taatggtgaatatcttcaaatgattta

SEQ ID NO: 4456 - RNA, 27 nt, synthetic construct
  misc_feature 1..27: note = Description of Artificial Sequence: Syntheticoligonucleotide
  source 1..27: mol_type = other RNA
ataatggtgaatatcttcaaatgattt

SEQ ID NO: 4457 - RNA, 27 nt, synthetic construct
  misc_feature 1..27: note = Description of Artificial Sequence: Syntheticoligonucleotide
  source 1..27: mol_type = other RNA
tataatggtgaatatcttcaaatgatt

SEQ ID NO: 4458 - RNA, 27 nt, synthetic construct
  misc_feature 1..27: note = Description of Artificial Sequence: Syntheticoligonucleotide
  source 1..27: mol_type = other RNA
atttgttctctataatggtgaatatct

SEQ ID NO: 4459 - RNA, 27 nt, synthetic construct
  misc_feature 1..27: note = Description of Artificial Sequence: Syntheticoligonucleotide
  source 1..27: mol_type = other RNA
aatttgttctctataatggtgaatatc

SEQ ID NO: 4460 - RNA, 27 nt, synthetic construct
  misc_feature 1..27: note = Description of Artificial Sequence: Syntheticoligonucleotide
  source 1..27: mol_type = other RNA
taatttgttctctataatggtgaatat

SEQ ID NO: 4461 - RNA, 27 nt, synthetic construct
  misc_feature 1..27: note = Description of Artificial Sequence: Syntheticoligonucleotide
  source 1..27: mol_type = other RNA
ttaatttgttctctataatggtgaata

SEQ ID NO: 4462 - RNA, 27 nt, synthetic construct
  misc_feature 1..27: note = Description of Artificial Sequence: Syntheticoligonucleotide
  source 1..27: mol_type = other RNA
tttaatttgttctctataatggtgaat

SEQ ID NO: 4463 - RNA, 27 nt, synthetic construct
  misc_feature 1..27: note = Description of Artificial Sequence: Syntheticoligonucleotide
  source 1..27: mol_type = other RNA
ttttaatttgttctctataatggtgaa

SEQ ID NO: 4464 - RNA, 27 nt, synthetic construct
  misc_feature 1..27: note = Description of Artificial Sequence: Syntheticoligonucleotide
  source 1..27: mol_type = other RNA
cttttaatttgttctctataatggtga

SEQ ID NO: 4465 - RNA, 27 nt, synthetic construct
  misc_feature 1..27: note = Description of Artificial Sequence: Syntheticoligonucleotide
  source 1..27: mol_type = other RNA
tcttttaatttgttctctataatggtg

SEQ ID NO: 4466 - RNA, 27 nt, synthetic construct
  misc_feature 1..27: note = Description of Artificial Sequence: Syntheticoligonucleotide
  source 1..27: mol_type = other RNA
ctcttttaatttgttctctataatggt

SEQ ID NO: 4467 - RNA, 27 nt, synthetic construct
  misc_feature 1..27: note = Description of Artificial Sequence: Syntheticoligonucleotide
  source 1..27: mol_type = other RNA
catttatttcctactaggaccataggt

SEQ ID NO: 4468 - RNA, 27 nt, synthetic construct
  misc_feature 1..27: note = Description of Artificial Sequence: Syntheticoligonucleotide
  source 1..27: mol_type = other RNA
ctactgttctagaaggcaaatcacatt

SEQ ID NO: 4469 - RNA, 27 nt, synthetic construct
  misc_feature 1..27: note = Description of Artificial Sequence: Syntheticoligonucleotide
  source 1..27: mol_type = other RNA
tctactgttctagaaggcaaatcacat

SEQ ID NO: 4470 - RNA, 27 nt, synthetic construct
  misc_feature 1..27: note = Description of Artificial Sequence: Syntheticoligonucleotide
  source 1..27: mol_type = other RNA
tgtctactgttctagaaggcaaatcac

SEQ ID NO: 4471 - RNA, 27 nt, synthetic construct
  misc_feature 1..27: note = Description of Artificial Sequence: Syntheticoligonucleotide
  source 1..27: mol_type = other RNA
gtttcaataaaaggaattccataactt

SEQ ID NO: 4472 - RNA, 27 nt, synthetic construct
  misc_feature 1..27: note = Description of Artificial Sequence: Syntheticoligonucleotide
  source 1..27: mol_type = other RNA
tgtttcaataaaaggaattccataact

SEQ ID NO: 4473 - RNA, 27 nt, synthetic construct
  misc_feature 1..27: note = Description of Artificial Sequence: Syntheticoligonucleotide
  source 1..27: mol_type = other RNA
atgtttcaataaaaggaattccataac

SEQ ID NO: 4474 - RNA, 27 nt, synthetic construct
  misc_feature 1..27: note = Description of Artificial Sequence: Syntheticoligonucleotide
  source 1..27: mol_type = other RNA
ctcgaactaatgtatagaaggcatcat

SEQ ID NO: 4475 - RNA, 27 nt, synthetic construct
  misc_feature 1..27: note = Description of Artificial Sequence: Syntheticoligonucleotide
  source 1..27: mol_type = other RNA
tctcgaactaatgtatagaaggcatca

SEQ ID NO: 4476 - RNA, 27 nt, synthetic construct
  misc_feature 1..27: note = Description of Artificial Sequence: Syntheticoligonucleotide
  source 1..27: mol_type = other RNA
tttctttatgttttcgaatttctcgaa

SEQ ID NO: 4477 - RNA, 27 nt, synthetic construct
  misc_feature 1..27: note = Description of Artificial Sequence: Syntheticoligonucleotide
  source 1..27: mol_type = other RNA
ttgctcatcttttctttatgttttcga

SEQ ID NO: 4478 - RNA, 27 nt, synthetic construct
  misc_feature 1..27: note = Description of Artificial Sequence: Syntheticoligonucleotide
  source 1..27: mol_type = other RNA
tttgctcatcttttctttatgttttcg

SEQ ID NO: 4479 - RNA, 27 nt, synthetic construct
  misc_feature 1..27: note = Description of Artificial Sequence: Syntheticoligonucleotide
  source 1..27: mol_type = other RNA
ctttgctcatcttttctttatgttttc

SEQ ID NO: 4480 - RNA, 27 nt, synthetic construct
  misc_feature 1..27: note = Description of Artificial Sequence: Syntheticoligonucleotide
  source 1..27: mol_type = other RNA
tctttgctcatcttttctttatgtttt

SEQ ID NO: 4481 - RNA, 27 nt, synthetic construct
  misc_feature 1..27: note = Description of Artificial Sequence: Syntheticoligonucleotide
  source 1..27: mol_type = other RNA
atctttgctcatcttttctttatgttt

SEQ ID NO: 4482 - RNA, 27 nt, synthetic construct
  misc_feature 1..27: note = Description of Artificial Sequence: Syntheticoligonucleotide
  source 1..27: mol_type = other RNA
catctttgctcatcttttctttatgtt

SEQ ID NO: 4483 - RNA, 27 nt, synthetic construct
  misc_feature 1..27: note = Description of Artificial Sequence: Syntheticoligonucleotide
  source 1..27: mol_type = other RNA
ccatctttgctcatcttttctttatgt

SEQ ID NO: 4484 - RNA, 27 nt, synthetic construct
  misc_feature 1..27: note = Description of Artificial Sequence: Syntheticoligonucleotide
  source 1..27: mol_type = other RNA
accatctttgctcatcttttctttatg

SEQ ID NO: 4485 - RNA, 27 nt, synthetic construct
  misc_feature 1..27: note = Description of Artificial Sequence: Syntheticoligonucleotide
  source 1..27: mol_type = other RNA
taccatctttgctcatcttttctttat

SEQ ID NO: 4486 - RNA, 27 nt, synthetic construct
  misc_feature 1..27: note = Description of Artificial Sequence: Syntheticoligonucleotide
  source 1..27: mol_type = other RNA
gtgtaatgtacaaaaattaccacttgt

SEQ ID NO: 4487 - RNA, 27 nt, synthetic construct
  misc_feature 1..27: note = Description of Artificial Sequence: Syntheticoligonucleotide
  source 1..27: mol_type = other RNA
agtgtaatgtacaaaaattaccacttg

SEQ ID NO: 4488 - RNA, 27 nt, synthetic construct
  misc_feature 1..27: note = Description of Artificial Sequence: Syntheticoligonucleotide
  source 1..27: mol_type = other RNA
gctaataatttagtgtaatgtacaaaa

SEQ ID NO: 4489 - RNA, 27 nt, synthetic construct
  misc_feature 1..27: note = Description of Artificial Sequence: Syntheticoligonucleotide
  source 1..27: mol_type = other RNA
tgctaataatttagtgtaatgtacaaa

SEQ ID NO: 4490 - RNA, 27 nt, synthetic construct
  misc_feature 1..27: note = Description of Artificial Sequence: Syntheticoligonucleotide
  source 1..27: mol_type = other RNA
atgctaataatttagtgtaatgtacaa

SEQ ID NO: 4491 - RNA, 27 nt, synthetic construct
  misc_feature 1..27: note = Description of Artificial Sequence: Syntheticoligonucleotide
  source 1..27: mol_type = other RNA
aatgctaataatttagtgtaatgtaca

SEQ ID NO: 4492 - RNA, 27 nt, synthetic construct
  misc_feature 1..27: note = Description of Artificial Sequence: Syntheticoligonucleotide
  source 1..27: mol_type = other RNA
aaatgctaataatttagtgtaatgtac

SEQ ID NO: 4493 - RNA, 27 nt, synthetic construct
  misc_feature 1..27: note = Description of Artificial Sequence: Syntheticoligonucleotide
  source 1..27: mol_type = other RNA
caaatgctaataatttagtgtaatgta

SEQ ID NO: 4494 - RNA, 27 nt, synthetic construct
  misc_feature 1..27: note = Description of Artificial Sequence: Syntheticoligonucleotide
  source 1..27: mol_type = other RNA
acaaatgctaataatttagtgtaatgt

SEQ ID NO: 4495 - RNA, 27 nt, synthetic construct
  misc_feature 1..27: note = Description of Artificial Sequence: Syntheticoligonucleotide
  source 1..27: mol_type = other RNA
aacaaatgctaataatttagtgtaatg

SEQ ID NO: 4496 - RNA, 27 nt, synthetic construct
  misc_feature 1..27: note = Description of Artificial Sequence: Syntheticoligonucleotide
  source 1..27: mol_type = other RNA
aaacaaatgctaataatttagtgtaat

SEQ ID NO: 4497 - RNA, 27 nt, synthetic construct
  misc_feature 1..27: note = Description of Artificial Sequence: Syntheticoligonucleotide
  source 1..27: mol_type = other RNA
ggtaatgctaaaacaaatgctaataat

SEQ ID NO: 4498 - RNA, 27 nt, synthetic construct
  misc_feature 1..27: note = Description of Artificial Sequence: Syntheticoligonucleotide
  source 1..27: mol_type = other RNA
aggtaatgctaaaacaaatgctaataa

SEQ ID NO: 4499 - RNA, 27 nt, synthetic construct
  misc_feature 1..27: note = Description of Artificial Sequence: Syntheticoligonucleotide
  source 1..27: mol_type = other RNA
taggtaatgctaaaacaaatgctaata

SEQ ID NO: 4500 - RNA, 27 nt, synthetic construct
  misc_feature 1..27: note = Description of Artificial Sequence: Syntheticoligonucleotide
  source 1..27: mol_type = other RNA
ttaggtaatgctaaaacaaatgctaat

SEQ ID NO: 4501 - RNA, 27 nt, synthetic construct
  misc_feature 1..27: note = Description of Artificial Sequence: Syntheticoligonucleotide
  source 1..27: mol_type = other RNA
attaggtaatgctaaaacaaatgctaa

SEQ ID NO: 4502 - RNA, 27 nt, synthetic construct
  misc_feature 1..27: note = Description of Artificial Sequence: Syntheticoligonucleotide
  source 1..27: mol_type = other RNA
aattaggtaatgctaaaacaaatgcta

SEQ ID NO: 4503 - RNA, 27 nt, synthetic construct
  misc_feature 1..27: note = Description of Artificial Sequence: Syntheticoligonucleotide
  source 1..27: mol_type = other RNA
aaattaggtaatgctaaaacaaatgct

SEQ ID NO: 4504 - RNA, 27 nt, synthetic construct
  misc_feature 1..27: note = Description of Artificial Sequence: Syntheticoligonucleotide
  source 1..27: mol_type = other RNA
aaaattaggtaatgctaaaacaaatgc

SEQ ID NO: 4505 - RNA, 27 nt, synthetic construct
  misc_feature 1..27: note = Description of Artificial Sequence: Syntheticoligonucleotide
  source 1..27: mol_type = other RNA
aaaaattaggtaatgctaaaacaaatg

SEQ ID NO: 4506 - RNA, 27 nt, synthetic construct
  misc_feature 1..27: note = Description of Artificial Sequence: Syntheticoligonucleotide
  source 1..27: mol_type = other RNA
acttccactgtcattttaaaataagca

SEQ ID NO: 4507 - RNA, 27 nt, synthetic construct
  misc_feature 1..27: note = Description of Artificial Sequence: Syntheticoligonucleotide
  source 1..27: mol_type = other RNA
aaacttccactgtcattttaaaataag

SEQ ID NO: 4508 - RNA, 27 nt, synthetic construct
  misc_feature 1..27: note = Description of Artificial Sequence: Syntheticoligonucleotide
  source 1..27: mol_type = other RNA
aactctgggaatactggcacttagagg

SEQ ID NO: 4509 - RNA, 27 nt, synthetic construct
  misc_feature 1..27: note = Description of Artificial Sequence: Syntheticoligonucleotide
  source 1..27: mol_type = other RNA
atgattcaaaagcttcattaatttgtt

SEQ ID NO: 4510 - RNA, 27 nt, synthetic construct
  misc_feature 1..27: note = Description of Artificial Sequence: Syntheticoligonucleotide
  source 1..27: mol_type = other RNA
gatgattcaaaagcttcattaatttgt

SEQ ID NO: 4511 - RNA, 27 nt, synthetic construct
  misc_feature 1..27: note = Description of Artificial Sequence: Syntheticoligonucleotide
  source 1..27: mol_type = other RNA
catttatgtgactagataaaacacaga

SEQ ID NO: 4512 - RNA, 27 nt, synthetic construct
  misc_feature 1..27: note = Description of Artificial Sequence: Syntheticoligonucleotide
  source 1..27: mol_type = other RNA
ccatttatgtgactagataaaacacag

SEQ ID NO: 4513 - RNA, 27 nt, synthetic construct
  misc_feature 1..27: note = Description of Artificial Sequence: Syntheticoligonucleotide
  source 1..27: mol_type = other RNA
aatccatttatgtgactagataaaaca

SEQ ID NO: 4514 - RNA, 27 nt, synthetic construct
  misc_feature 1..27: note = Description of Artificial Sequence: Syntheticoligonucleotide
  source 1..27: mol_type = other RNA
ctgaaattagtaattaatccatttatg

SEQ ID NO: 4515 - RNA, 27 nt, synthetic construct
  misc_feature 1..27: note = Description of Artificial Sequence: Syntheticoligonucleotide
  source 1..27: mol_type = other RNA
actgaaattagtaattaatccatttat

SEQ ID NO: 4516 - RNA, 27 nt, synthetic construct
  misc_feature 1..27: note = Description of Artificial Sequence: Syntheticoligonucleotide
  source 1..27: mol_type = other RNA
cctcaatgtttcagtaaaaaccaatta

SEQ ID NO: 4517 - RNA, 27 nt, synthetic construct
  misc_feature 1..27: note = Description of Artificial Sequence: Syntheticoligonucleotide
  source 1..27: mol_type = other RNA
atttatctaatgtgaaaaggaaatggc

SEQ ID NO: 4518 - RNA, 27 nt, synthetic construct
  misc_feature 1..27: note = Description of Artificial Sequence: Syntheticoligonucleotide
  source 1..27: mol_type = other RNA
atagtaatttatctaatgtgaaaagga

SEQ ID NO: 4519 - RNA, 27 nt, synthetic construct
  misc_feature 1..27: note = Description of Artificial Sequence: Syntheticoligonucleotide
  source 1..27: mol_type = other RNA
agtctttatagtaatttatctaatgtg

SEQ ID NO: 4520 - RNA, 27 nt, synthetic construct
  misc_feature 1..27: note = Description of Artificial Sequence: Syntheticoligonucleotide
  source 1..27: mol_type = other RNA
gagtctttatagtaatttatctaatgt

SEQ ID NO: 4521 - RNA, 27 nt, synthetic construct
  misc_feature 1..27: note = Description of Artificial Sequence: Syntheticoligonucleotide
  source 1..27: mol_type = other RNA
ggagtctttatagtaatttatctaatg

SEQ ID NO: 4522 - RNA, 27 nt, synthetic construct
  misc_feature 1..27: note = Description of Artificial Sequence: Syntheticoligonucleotide
  source 1..27: mol_type = other RNA
cccatttcatactgggtctgccttaac

SEQ ID NO: 4523 - RNA, 27 nt, synthetic construct
  misc_feature 1..27: note = Description of Artificial Sequence: Syntheticoligonucleotide
  source 1..27: mol_type = other RNA
ccccatttcatactgggtctgccttaa

SEQ ID NO: 4524 - RNA, 27 nt, synthetic construct
  misc_feature 1..27: note = Description of Artificial Sequence: Syntheticoligonucleotide
  source 1..27: mol_type = other RNA
tccccatttcatactgggtctgcctta

SEQ ID NO: 4525 - RNA, 27 nt, synthetic construct
  misc_feature 1..27: note = Description of Artificial Sequence: Syntheticoligonucleotide
  source 1..27: mol_type = other RNA
atccccatttcatactgggtctgcctt

SEQ ID NO: 4526 - RNA, 27 nt, synthetic construct
  misc_feature 1..27: note = Description of Artificial Sequence: Syntheticoligonucleotide
  source 1..27: mol_type = other RNA
ttgctataataatccccatttcatact

SEQ ID NO: 4527 - RNA, 27 nt, synthetic construct
  misc_feature 1..27: note = Description of Artificial Sequence: Syntheticoligonucleotide
  source 1..27: mol_type = other RNA
ccaaaatggttgctataataatcccca

SEQ ID NO: 4528 - RNA, 27 nt, synthetic construct
  misc_feature 1..27: note = Description of Artificial Sequence: Syntheticoligonucleotide
  source 1..27: mol_type = other RNA
atttagtagcatgtaaatatagcccca

SEQ ID NO: 4529 - RNA, 27 nt, synthetic construct
  misc_feature 1..27: note = Description of Artificial Sequence: Syntheticoligonucleotide
  source 1..27: mol_type = other RNA
aatttagtagcatgtaaatatagcccc

SEQ ID NO: 4530 - RNA, 27 nt, synthetic construct
  misc_feature 1..27: note = Description of Artificial Sequence: Syntheticoligonucleotide
  source 1..27: mol_type = other RNA
aaatttagtagcatgtaaatatagccc

SEQ ID NO: 4531 - RNA, 27 nt, synthetic construct
  misc_feature 1..27: note = Description of Artificial Sequence: Syntheticoligonucleotide
  source 1..27: mol_type = other RNA
aaaatttagtagcatgtaaatatagcc

SEQ ID NO: 4532 - RNA, 27 nt, synthetic construct
  misc_feature 1..27: note = Description of Artificial Sequence: Syntheticoligonucleotide
  source 1..27: mol_type = other RNA
aaaaatttagtagcatgtaaatatagc

SEQ ID NO: 4533 - RNA, 27 nt, synthetic construct
  misc_feature 1..27: note = Description of Artificial Sequence: Syntheticoligonucleotide
  source 1..27: mol_type = other RNA
taaaaatttagtagcatgtaaatatag

SEQ ID NO: 4534 - RNA, 27 nt, synthetic construct
  misc_feature 1..27: note = Description of Artificial Sequence: Syntheticoligonucleotide
  source 1..27: mol_type = other RNA
ataaaaatttagtagcatgtaaatata

SEQ ID NO: 4535 - RNA, 27 nt, synthetic construct
  misc_feature 1..27: note = Description of Artificial Sequence: Syntheticoligonucleotide
  source 1..27: mol_type = other RNA
tataaaaatttagtagcatgtaaatat

SEQ ID NO: 4536 - RNA, 27 nt, synthetic construct
  misc_feature 1..27: note = Description of Artificial Sequence: Syntheticoligonucleotide
  source 1..27: mol_type = other RNA
ttataaaaatttagtagcatgtaaata

SEQ ID NO: 4537 - RNA, 27 nt, synthetic construct
  misc_feature 1..27: note = Description of Artificial Sequence: Syntheticoligonucleotide
  source 1..27: mol_type = other RNA
attataaaaatttagtagcatgtaaat

SEQ ID NO: 4538 - RNA, 27 nt, synthetic construct
  misc_feature 1..27: note = Description of Artificial Sequence: Syntheticoligonucleotide
  source 1..27: mol_type = other RNA
tattataaaaatttagtagcatgtaaa

SEQ ID NO: 4539 - RNA, 27 nt, synthetic construct
  misc_feature 1..27: note = Description of Artificial Sequence: Syntheticoligonucleotide
  source 1..27: mol_type = other RNA
aagatttaaagttatactatgaaagag

SEQ ID NO: 4540 - RNA, 27 nt, synthetic construct
  misc_feature 1..27: note = Description of Artificial Sequence: Syntheticoligonucleotide
  source 1..27: mol_type = other RNA
aagaaaagatttaaagttatactatga

SEQ ID NO: 4541 - RNA, 27 nt, synthetic construct
  misc_feature 1..27: note = Description of Artificial Sequence: Syntheticoligonucleotide
  source 1..27: mol_type = other RNA
gaagaaaagatttaaagttatactatg

SEQ ID NO: 4542 - RNA, 27 nt, synthetic construct
  misc_feature 1..27: note = Description of Artificial Sequence: Syntheticoligonucleotide
  source 1..27: mol_type = other RNA
agactcaagttgaagaaaagatttaaa

SEQ ID NO: 4543 - RNA, 27 nt, synthetic construct
  misc_feature 1..27: note = Description of Artificial Sequence: Syntheticoligonucleotide
  source 1..27: mol_type = other RNA
aagactcaagttgaagaaaagatttaa

SEQ ID NO: 4544 - RNA, 27 nt, synthetic construct
  misc_feature 1..27: note = Description of Artificial Sequence: Syntheticoligonucleotide
  source 1..27: mol_type = other RNA
ttaaaactatcttcaaagactcaagtt

SEQ ID NO: 4545 - RNA, 27 nt, synthetic construct
  misc_feature 1..27: note = Description of Artificial Sequence: Syntheticoligonucleotide
  source 1..27: mol_type = other RNA
aattaaaactatcttcaaagactcaag

SEQ ID NO: 4546 - RNA, 27 nt, synthetic construct
  misc_feature 1..27: note = Description of Artificial Sequence: Syntheticoligonucleotide
  source 1..27: mol_type = other RNA
gaattaaaactatcttcaaagactcaa

SEQ ID NO: 4547 - RNA, 27 nt, synthetic construct
  misc_feature 1..27: note = Description of Artificial Sequence: Syntheticoligonucleotide
  source 1..27: mol_type = other RNA
tgtcacaagcagaattaaaactatctt

SEQ ID NO: 4548 - RNA, 27 nt, synthetic construct
  misc_feature 1..27: note = Description of Artificial Sequence: Syntheticoligonucleotide
  source 1..27: mol_type = other RNA
atgtcacaagcagaattaaaactatct

SEQ ID NO: 4549 - RNA, 27 nt, synthetic construct
  misc_feature 1..27: note = Description of Artificial Sequence: Syntheticoligonucleotide
  source 1..27: mol_type = other RNA
aatgtcacaagcagaattaaaactatc

SEQ ID NO: 4550 - RNA, 27 nt, synthetic construct
  misc_feature 1..27: note = Description of Artificial Sequence: Syntheticoligonucleotide
  source 1..27: mol_type = other RNA
ccaaataatcttttaatgtcacaagca

SEQ ID NO: 4551 - RNA, 27 nt, synthetic construct
  misc_feature 1..27: note = Description of Artificial Sequence: Syntheticoligonucleotide
  source 1..27: mol_type = other RNA
caaaatctcaacttttgagttaatatt

SEQ ID NO: 4552 - RNA, 27 nt, synthetic construct
  misc_feature 1..27: note = Description of Artificial Sequence: Syntheticoligonucleotide
  source 1..27: mol_type = other RNA
aaaaaaaaattaatgtcttggcacacc

SEQ ID NO: 4553 - RNA, 27 nt, synthetic construct
  misc_feature 1..27: note = Description of Artificial Sequence: Syntheticoligonucleotide
  source 1..27: mol_type = other RNA
tgtttatgcaatgttaatttaaccagt

SEQ ID NO: 4554 - RNA, 27 nt, synthetic construct
  misc_feature 1..27: note = Description of Artificial Sequence: Syntheticoligonucleotide
  source 1..27: mol_type = other RNA
gtgtttatgcaatgttaatttaaccag

SEQ ID NO: 4555 - RNA, 27 nt, synthetic construct
  misc_feature 1..27: note = Description of Artificial Sequence: Syntheticoligonucleotide
  source 1..27: mol_type = other RNA
agtgtttatgcaatgttaatttaacca

SEQ ID NO: 4556 - RNA, 27 nt, synthetic construct
  misc_feature 1..27: note = Description of Artificial Sequence: Syntheticoligonucleotide
  source 1..27: mol_type = other RNA
cagacttgaaaagtgtttatgcaatgt

SEQ ID NO: 4557 - RNA, 27 nt, synthetic construct
  misc_feature 1..27: note = Description of Artificial Sequence: Syntheticoligonucleotide
  source 1..27: mol_type = other RNA
gcattattaaatatggatcagacttga

SEQ ID NO: 4558 - RNA, 27 nt, synthetic construct
  misc_feature 1..27: note = Description of Artificial Sequence: Syntheticoligonucleotide
  source 1..27: mol_type = other RNA
atgccatctcacttcatttattttaaa

SEQ ID NO: 4559 - RNA, 27 nt, synthetic construct
  misc_feature 1..27: note = Description of Artificial Sequence: Syntheticoligonucleotide
  source 1..27: mol_type = other RNA
catgccatctcacttcatttattttaa

SEQ ID NO: 4560 - RNA, 27 nt, synthetic construct
  misc_feature 1..27: note = Description of Artificial Sequence: Syntheticoligonucleotide
  source 1..27: mol_type = other RNA
aaaatttacagattgtgctgagcttga

SEQ ID NO: 4561 - RNA, 27 nt, synthetic construct
  misc_feature 1..27: note = Description of Artificial Sequence: Syntheticoligonucleotide
  source 1..27: mol_type = other RNA
aaaaatttacagattgtgctgagcttg

SEQ ID NO: 4562 - RNA, 27 nt, synthetic construct
  misc_feature 1..27: note = Description of Artificial Sequence: Syntheticoligonucleotide
  source 1..27: mol_type = other RNA
attgtcctaaaagaatcacagttatgc

SEQ ID NO: 4563 - RNA, 27 nt, synthetic construct
  misc_feature 1..27: note = Description of Artificial Sequence: Syntheticoligonucleotide
  source 1..27: mol_type = other RNA
cagtaattgtcctaaaagaatcacagt

SEQ ID NO: 4564 - RNA, 27 nt, synthetic construct
  misc_feature 1..27: note = Description of Artificial Sequence: Syntheticoligonucleotide
  source 1..27: mol_type = other RNA
acagtaattgtcctaaaagaatcacag

SEQ ID NO: 4565 - RNA, 27 nt, synthetic construct
  misc_feature 1..27: note = Description of Artificial Sequence: Syntheticoligonucleotide
  source 1..27: mol_type = other RNA
ggtcaatatgaatatctgacatacacc

SEQ ID NO: 4566 - RNA, 27 nt, synthetic construct
  misc_feature 1..27: note = Description of Artificial Sequence: Syntheticoligonucleotide
  source 1..27: mol_type = other RNA
gggtcaatatgaatatctgacatacac

SEQ ID NO: 4567 - RNA, 27 nt, synthetic construct
  misc_feature 1..27: note = Description of Artificial Sequence: Syntheticoligonucleotide
  source 1..27: mol_type = other RNA
agagaaaactggaatattacacatttg

SEQ ID NO: 4568 - RNA, 27 nt, synthetic construct
  misc_feature 1..27: note = Description of Artificial Sequence: Syntheticoligonucleotide
  source 1..27: mol_type = other RNA
ttaggttctaaattcctatgcagtgtg

SEQ ID NO: 4569 - RNA, 27 nt, synthetic construct
  misc_feature 1..27: note = Description of Artificial Sequence: Syntheticoligonucleotide
  source 1..27: mol_type = other RNA
attaggacaaaattgtgcaatggtgac

SEQ ID NO: 4570 - RNA, 27 nt, synthetic construct
  misc_feature 1..27: note = Description of Artificial Sequence: Syntheticoligonucleotide
  source 1..27: mol_type = other RNA
tattaggacaaaattgtgcaatggtga

SEQ ID NO: 4571 - RNA, 27 nt, synthetic construct
  misc_feature 1..27: note = Description of Artificial Sequence: Syntheticoligonucleotide
  source 1..27: mol_type = other RNA
atattaggacaaaattgtgcaatggtg

SEQ ID NO: 4572 - RNA, 27 nt, synthetic construct
  misc_feature 1..27: note = Description of Artificial Sequence: Syntheticoligonucleotide
  source 1..27: mol_type = other RNA
tatattaggacaaaattgtgcaatggt

SEQ ID NO: 4573 - RNA, 27 nt, synthetic construct
  misc_feature 1..27: note = Description of Artificial Sequence: Syntheticoligonucleotide
  source 1..27: mol_type = other RNA
atatattaggacaaaattgtgcaatgg

SEQ ID NO: 4574 - RNA, 27 nt, synthetic construct
  misc_feature 1..27: note = Description of Artificial Sequence: Syntheticoligonucleotide
  source 1..27: mol_type = other RNA
tatatattaggacaaaattgtgcaatg

SEQ ID NO: 4575 - RNA, 27 nt, synthetic construct
  misc_feature 1..27: note = Description of Artificial Sequence: Syntheticoligonucleotide
  source 1..27: mol_type = other RNA
gtttctcaatgcagaattcatgctatc

SEQ ID NO: 4576 - RNA, 27 nt, synthetic construct
  misc_feature 1..27: note = Description of Artificial Sequence: Syntheticoligonucleotide
  source 1..27: mol_type = other RNA
agtttctcaatgcagaattcatgctat

SEQ ID NO: 4577 - RNA, 27 nt, synthetic construct
  misc_feature 1..27: note = Description of Artificial Sequence: Syntheticoligonucleotide
  source 1..27: mol_type = other RNA
cattatcccaaacaggcacttcaaact

SEQ ID NO: 4578 - RNA, 27 nt, synthetic construct
  misc_feature 1..27: note = Description of Artificial Sequence: Syntheticoligonucleotide
  source 1..27: mol_type = other RNA
tcattatcccaaacaggcacttcaaac

SEQ ID NO: 4579 - RNA, 27 nt, synthetic construct
  misc_feature 1..27: note = Description of Artificial Sequence: Syntheticoligonucleotide
  source 1..27: mol_type = other RNA
atcattatcccaaacaggcacttcaaa

SEQ ID NO: 4580 - RNA, 27 nt, synthetic construct
  misc_feature 1..27: note = Description of Artificial Sequence: Syntheticoligonucleotide
  source 1..27: mol_type = other RNA
tactagtaagaaattggcactcaaagg

SEQ ID NO: 4581 - RNA, 27 nt, synthetic construct
  misc_feature 1..27: note = Description of Artificial Sequence: Syntheticoligonucleotide
  source 1..27: mol_type = other RNA
gtactagtaagaaattggcactcaaag

SEQ ID NO: 4582 - RNA, 27 nt, synthetic construct
  misc_feature 1..27: note = Description of Artificial Sequence: Syntheticoligonucleotide
  source 1..27: mol_type = other RNA
agtactagtaagaaattggcactcaaa

SEQ ID NO: 4583 - RNA, 27 nt, synthetic construct
  misc_feature 1..27: note = Description of Artificial Sequence: Syntheticoligonucleotide
  source 1..27: mol_type = other RNA
tagtactagtaagaaattggcactcaa

SEQ ID NO: 4584 - RNA, 27 nt, synthetic construct
  misc_feature 1..27: note = Description of Artificial Sequence: Syntheticoligonucleotide
  source 1..27: mol_type = other RNA
atagtactagtaagaaattggcactca

SEQ ID NO: 4585 - RNA, 27 nt, synthetic construct
  misc_feature 1..27: note = Description of Artificial Sequence: Syntheticoligonucleotide
  source 1..27: mol_type = other RNA
aatagtactagtaagaaattggcactc

SEQ ID NO: 4586 - RNA, 27 nt, synthetic construct
  misc_feature 1..27: note = Description of Artificial Sequence: Syntheticoligonucleotide
  source 1..27: mol_type = other RNA
ctatacaaaaatagttaaaatacattc

SEQ ID NO: 4587 - RNA, 27 nt, synthetic construct
  misc_feature 1..27: note = Description of Artificial Sequence: Syntheticoligonucleotide
  source 1..27: mol_type = other RNA
actatacaaaaatagttaaaatacatt

SEQ ID NO: 4588 - RNA, 27 nt, synthetic construct
  misc_feature 1..27: note = Description of Artificial Sequence: Syntheticoligonucleotide
  source 1..27: mol_type = other RNA
tcagtttacactatacaaaaatagtta

SEQ ID NO: 4589 - RNA, 27 nt, synthetic construct
  misc_feature 1..27: note = Description of Artificial Sequence: Syntheticoligonucleotide
  source 1..27: mol_type = other RNA
ttcagtttacactatacaaaaatagtt

SEQ ID NO: 4590 - RNA, 27 nt, synthetic construct
  misc_feature 1..27: note = Description of Artificial Sequence: Syntheticoligonucleotide
  source 1..27: mol_type = other RNA
tttcagtttacactatacaaaaatagt

SEQ ID NO: 4591 - RNA, 27 nt, synthetic construct
  misc_feature 1..27: note = Description of Artificial Sequence: Syntheticoligonucleotide
  source 1..27: mol_type = other RNA
gtttcagtttacactatacaaaaatag

SEQ ID NO: 4592 - RNA, 27 nt, synthetic construct
  misc_feature 1..27: note = Description of Artificial Sequence: Syntheticoligonucleotide
  source 1..27: mol_type = other RNA
tgtttcagtttacactatacaaaaata

SEQ ID NO: 4593 - RNA, 27 nt, synthetic construct
  misc_feature 1..27: note = Description of Artificial Sequence: Syntheticoligonucleotide
  source 1..27: mol_type = other RNA
atgtttcagtttacactatacaaaaat

SEQ ID NO: 4594 - RNA, 27 nt, synthetic construct
  misc_feature 1..27: note = Description of Artificial Sequence: Syntheticoligonucleotide
  source 1..27: mol_type = other RNA
gcacaatgtacaaaatgtgcatgtttc

SEQ ID NO: 4595 - RNA, 27 nt, synthetic construct
  misc_feature 1..27: note = Description of Artificial Sequence: Syntheticoligonucleotide
  source 1..27: mol_type = other RNA
agcacaatgtacaaaatgtgcatgttt

SEQ ID NO: 4596 - RNA, 27 nt, synthetic construct
  misc_feature 1..27: note = Description of Artificial Sequence: Syntheticoligonucleotide
  source 1..27: mol_type = other RNA
gaaagcacaatgtacaaaatgtgcatg

SEQ ID NO: 4597 - RNA, 27 nt, synthetic construct
  misc_feature 1..27: note = Description of Artificial Sequence: Syntheticoligonucleotide
  source 1..27: mol_type = other RNA
agaaagcacaatgtacaaaatgtgcat

SEQ ID NO: 4598 - RNA, 27 nt, synthetic construct
  misc_feature 1..27: note = Description of Artificial Sequence: Syntheticoligonucleotide
  source 1..27: mol_type = other RNA
aagaaagcacaatgtacaaaatgtgca

SEQ ID NO: 4599 - RNA, 27 nt, synthetic construct
  misc_feature 1..27: note = Description of Artificial Sequence: Syntheticoligonucleotide
  source 1..27: mol_type = other RNA
aaagaaagcacaatgtacaaaatgtgc

SEQ ID NO: 4600 - RNA, 27 nt, synthetic construct
  misc_feature 1..27: note = Description of Artificial Sequence: Syntheticoligonucleotide
  source 1..27: mol_type = other RNA
aaaagaaagcacaatgtacaaaatgtg

SEQ ID NO: 4601 - RNA, 27 nt, synthetic construct
  misc_feature 1..27: note = Description of Artificial Sequence: Syntheticoligonucleotide
  source 1..27: mol_type = other RNA
caaaagaaagcacaatgtacaaaatgt

SEQ ID NO: 4602 - RNA, 27 nt, synthetic construct
  misc_feature 1..27: note = Description of Artificial Sequence: Syntheticoligonucleotide
  source 1..27: mol_type = other RNA
acaaaagaaagcacaatgtacaaaatg

SEQ ID NO: 4603 - RNA, 27 nt, synthetic construct
  misc_feature 1..27: note = Description of Artificial Sequence: Syntheticoligonucleotide
  source 1..27: mol_type = other RNA
actggatcacactgcatatgtcccaca

SEQ ID NO: 4604 - RNA, 27 nt, synthetic construct
  misc_feature 1..27: note = Description of Artificial Sequence: Syntheticoligonucleotide
  source 1..27: mol_type = other RNA
aactggatcacactgcatatgtcccac

SEQ ID NO: 4605 - RNA, 27 nt, synthetic construct
  misc_feature 1..27: note = Description of Artificial Sequence: Syntheticoligonucleotide
  source 1..27: mol_type = other RNA
caactggatcacactgcatatgtccca

SEQ ID NO: 4606 - RNA, 27 nt, synthetic construct
  misc_feature 1..27: note = Description of Artificial Sequence: Syntheticoligonucleotide
  source 1..27: mol_type = other RNA
acaactggatcacactgcatatgtccc

SEQ ID NO: 4607 - RNA, 27 nt, synthetic construct
  misc_feature 1..27: note = Description of Artificial Sequence: Syntheticoligonucleotide
  source 1..27: mol_type = other RNA
aacaactggatcacactgcatatgtcc

SEQ ID NO: 4608 - RNA, 27 nt, synthetic construct
  misc_feature 1..27: note = Description of Artificial Sequence: Syntheticoligonucleotide
  source 1..27: mol_type = other RNA
aaacaactggatcacactgcatatgtc

SEQ ID NO: 4609 - RNA, 27 nt, synthetic construct
  misc_feature 1..27: note = Description of Artificial Sequence: Syntheticoligonucleotide
  source 1..27: mol_type = other RNA
aaaacaactggatcacactgcatatgt

SEQ ID NO: 4610 - RNA, 27 nt, synthetic construct
  misc_feature 1..27: note = Description of Artificial Sequence: Syntheticoligonucleotide
  source 1..27: mol_type = other RNA
gaaaacaactggatcacactgcatatg

SEQ ID NO: 4611 - RNA, 27 nt, synthetic construct
  misc_feature 1..27: note = Description of Artificial Sequence: Syntheticoligonucleotide
  source 1..27: mol_type = other RNA
ggaaaacaactggatcacactgcatat

SEQ ID NO: 4612 - RNA, 27 nt, synthetic construct
  misc_feature 1..27: note = Description of Artificial Sequence: Syntheticoligonucleotide
  source 1..27: mol_type = other RNA
tgatggaaaacaactggatcacactgc

SEQ ID NO: 4613 - RNA, 27 nt, synthetic construct
  misc_feature 1..27: note = Description of Artificial Sequence: Syntheticoligonucleotide
  source 1..27: mol_type = other RNA
atgatggaaaacaactggatcacactg

SEQ ID NO: 4614 - RNA, 27 nt, synthetic construct
  misc_feature 1..27: note = Description of Artificial Sequence: Syntheticoligonucleotide
  source 1..27: mol_type = other RNA
aatgatggaaaacaactggatcacact

SEQ ID NO: 4615 - RNA, 27 nt, synthetic construct
  misc_feature 1..27: note = Description of Artificial Sequence: Syntheticoligonucleotide
  source 1..27: mol_type = other RNA
aaatgatggaaaacaactggatcacac

SEQ ID NO: 4616 - RNA, 27 nt, synthetic construct
  misc_feature 1..27: note = Description of Artificial Sequence: Syntheticoligonucleotide
  source 1..27: mol_type = other RNA
caaatgatggaaaacaactggatcaca

SEQ ID NO: 4617 - RNA, 27 nt, synthetic construct
  misc_feature 1..27: note = Description of Artificial Sequence: Syntheticoligonucleotide
  source 1..27: mol_type = other RNA
ccaaatgatggaaaacaactggatcac

SEQ ID NO: 4618 - RNA, 27 nt, synthetic construct
  misc_feature 1..27: note = Description of Artificial Sequence: Syntheticoligonucleotide
  source 1..27: mol_type = other RNA
acattcctaggtcagcgcaaccaaatg

SEQ ID NO: 4619 - RNA, 27 nt, synthetic construct
  misc_feature 1..27: note = Description of Artificial Sequence: Syntheticoligonucleotide
  source 1..27: mol_type = other RNA
aacattcctaggtcagcgcaaccaaat

SEQ ID NO: 4620 - RNA, 27 nt, synthetic construct
  misc_feature 1..27: note = Description of Artificial Sequence: Syntheticoligonucleotide
  source 1..27: mol_type = other RNA
taatgtttgatatgaccaacattccta

SEQ ID NO: 4621 - RNA, 27 nt, synthetic construct
  misc_feature 1..27: note = Description of Artificial Sequence: Syntheticoligonucleotide
  source 1..27: mol_type = other RNA
ttaatgtttgatatgaccaacattcct

SEQ ID NO: 4622 - RNA, 27 nt, synthetic construct
  misc_feature 1..27: note = Description of Artificial Sequence: Syntheticoligonucleotide
  source 1..27: mol_type = other RNA
tttaatgtttgatatgaccaacattcc

SEQ ID NO: 4623 - RNA, 27 nt, synthetic construct
  misc_feature 1..27: note = Description of Artificial Sequence: Syntheticoligonucleotide
  source 1..27: mol_type = other RNA
ttttaatgtttgatatgaccaacattc

SEQ ID NO: 4624 - RNA, 27 nt, synthetic construct
  misc_feature 1..27: note = Description of Artificial Sequence: Syntheticoligonucleotide
  source 1..27: mol_type = other RNA
tttttaatgtttgatatgaccaacatt

SEQ ID NO: 4625 - RNA, 27 nt, synthetic construct
  misc_feature 1..27: note = Description of Artificial Sequence: Syntheticoligonucleotide
  source 1..27: mol_type = other RNA
atttttaatgtttgatatgaccaacat

SEQ ID NO: 4626 - RNA, 27 nt, synthetic construct
  misc_feature 1..27: note = Description of Artificial Sequence: Syntheticoligonucleotide
  source 1..27: mol_type = other RNA
catttttaatgtttgatatgaccaaca

SEQ ID NO: 4627 - RNA, 27 nt, synthetic construct
  misc_feature 1..27: note = Description of Artificial Sequence: Syntheticoligonucleotide
  source 1..27: mol_type = other RNA
tcatttttaatgtttgatatgaccaac

SEQ ID NO: 4628 - RNA, 27 nt, synthetic construct
  misc_feature 1..27: note = Description of Artificial Sequence: Syntheticoligonucleotide
  source 1..27: mol_type = other RNA
gtcatttttaatgtttgatatgaccaa

SEQ ID NO: 4629 - RNA, 27 nt, synthetic construct
  misc_feature 1..27: note = Description of Artificial Sequence: Syntheticoligonucleotide
  source 1..27: mol_type = other RNA
cctataaacatttaaaagttaatttca

SEQ ID NO: 4630 - RNA, 27 nt, synthetic construct
  misc_feature 1..27: note = Description of Artificial Sequence: Syntheticoligonucleotide
  source 1..27: mol_type = other RNA
tcctataaacatttaaaagttaatttc

SEQ ID NO: 4631 - RNA, 27 nt, synthetic construct
  misc_feature 1..27: note = Description of Artificial Sequence: Syntheticoligonucleotide
  source 1..27: mol_type = other RNA
atactcctataaacatttaaaagttaa

SEQ ID NO: 4632 - RNA, 27 nt, synthetic construct
  misc_feature 1..27: note = Description of Artificial Sequence: Syntheticoligonucleotide
  source 1..27: mol_type = other RNA
catactcctataaacatttaaaagtta

SEQ ID NO: 4633 - RNA, 27 nt, synthetic construct
  misc_feature 1..27: note = Description of Artificial Sequence: Syntheticoligonucleotide
  source 1..27: mol_type = other RNA
acatactcctataaacatttaaaagtt

SEQ ID NO: 4634 - RNA, 27 nt, synthetic construct
  misc_feature 1..27: note = Description of Artificial Sequence: Syntheticoligonucleotide
  source 1..27: mol_type = other RNA
cacatactcctataaacatttaaaagt

SEQ ID NO: 4635 - RNA, 27 nt, synthetic construct
  misc_feature 1..27: note = Description of Artificial Sequence: Syntheticoligonucleotide
  source 1..27: mol_type = other RNA
gcacatactcctataaacatttaaaag

SEQ ID NO: 4636 - RNA, 27 nt, synthetic construct
  misc_feature 1..27: note = Description of Artificial Sequence: Syntheticoligonucleotide
  source 1..27: mol_type = other RNA
agcacatactcctataaacatttaaaa

SEQ ID NO: 4637 - RNA, 27 nt, synthetic construct
  misc_feature 1..27: note = Description of Artificial Sequence: Syntheticoligonucleotide
  source 1..27: mol_type = other RNA
ttcatgacaaaaatattacaaatttta

SEQ ID NO: 4638 - RNA, 27 nt, synthetic construct
  misc_feature 1..27: note = Description of Artificial Sequence: Syntheticoligonucleotide
  source 1..27: mol_type = other RNA
gttcatgacaaaaatattacaaatttt

SEQ ID NO: 4639 - RNA, 27 nt, synthetic construct
  misc_feature 1..27: note = Description of Artificial Sequence: Syntheticoligonucleotide
  source 1..27: mol_type = other RNA
agttcatgacaaaaatattacaaattt

SEQ ID NO: 4640 - RNA, 27 nt, synthetic construct
  misc_feature 1..27: note = Description of Artificial Sequence: Syntheticoligonucleotide
  source 1..27: mol_type = other RNA
cagttcatgacaaaaatattacaaatt

SEQ ID NO: 4641 - RNA, 27 nt, synthetic construct
  misc_feature 1..27: note = Description of Artificial Sequence: Syntheticoligonucleotide
  source 1..27: mol_type = other RNA
acagttcatgacaaaaatattacaaat

SEQ ID NO: 4642 - RNA, 27 nt, synthetic construct
  misc_feature 1..27: note = Description of Artificial Sequence: Syntheticoligonucleotide
  source 1..27: mol_type = other RNA
tacagttcatgacaaaaatattacaaa

SEQ ID NO: 4643 - RNA, 27 nt, synthetic construct
  misc_feature 1..27: note = Description of Artificial Sequence: Syntheticoligonucleotide
  source 1..27: mol_type = other RNA
gtacagttcatgacaaaaatattacaa

SEQ ID NO: 4644 - RNA, 27 nt, synthetic construct
  misc_feature 1..27: note = Description of Artificial Sequence: Syntheticoligonucleotide
  source 1..27: mol_type = other RNA
agtacagttcatgacaaaaatattaca

SEQ ID NO: 4645 - RNA, 27 nt, synthetic construct
  misc_feature 1..27: note = Description of Artificial Sequence: Syntheticoligonucleotide
  source 1..27: mol_type = other RNA
gtaactatttttattacattacaataa

SEQ ID NO: 4646 - RNA, 27 nt, synthetic construct
  misc_feature 1..27: note = Description of Artificial Sequence: Syntheticoligonucleotide
  source 1..27: mol_type = other RNA
tgtaactatttttattacattacaata

SEQ ID NO: 4647 - RNA, 27 nt, synthetic construct
  misc_feature 1..27: note = Description of Artificial Sequence: Syntheticoligonucleotide
  source 1..27: mol_type = other RNA
ctgtaactatttttattacattacaat

SEQ ID NO: 4648 - RNA, 27 nt, synthetic construct
  misc_feature 1..27: note = Description of Artificial Sequence: Syntheticoligonucleotide
  source 1..27: mol_type = other RNA
actgtaactatttttattacattacaa

SEQ ID NO: 4649 - RNA, 27 nt, synthetic construct
  misc_feature 1..27: note = Description of Artificial Sequence: Syntheticoligonucleotide
  source 1..27: mol_type = other RNA
cactgtaactatttttattacattaca

SEQ ID NO: 4650 - DNA, 25 bp, synthetic construct
  misc_feature 1..25: note = Description of Artificial Sequence: Syntheticoligonucleotide
  misc_feature 1..25: note = Description of Combined DNA/RNA Molecule: Syntheticoligonucleotide
  source 1..25: mol_type = other DNA
  modified_base order(7,10,16,20): mod_base = OTHER; note = Uracil
gaggcctgctgaaaatgactgaata

SEQ ID NO: 4651 - DNA, 25 bp, synthetic construct
  misc_feature 1..25: note = Description of Artificial Sequence: Syntheticoligonucleotide
  misc_feature 1..25: note = Description of Combined DNA/RNA Molecule: Syntheticoligonucleotide
  source 1..25: mol_type = other DNA
  modified_base order(6,9,15,19,23): mod_base = OTHER; note = Uracil
aggcctgctgaaaatgactgaatat

SEQ ID NO: 4652 - DNA, 25 bp, synthetic construct
  misc_feature 1..25: note = Description of Artificial Sequence: Syntheticoligonucleotide
  misc_feature 1..25: note = Description of Combined DNA/RNA Molecule: Syntheticoligonucleotide
  source 1..25: mol_type = other DNA
  modified_base order(5,8,14,18,22): mod_base = OTHER; note = Uracil
ggcctgctgaaaatgactgaatata

SEQ ID NO: 4653 - RNA, 25 nt, synthetic construct
  misc_feature 1..25: note = Description of Artificial Sequence: Syntheticoligonucleotide
  source 1..25: mol_type = other RNA
gcctgctgaaaatgactgaatataa

SEQ ID NO: 4654 - RNA, 25 nt, synthetic construct
  misc_feature 1..25: note = Description of Artificial Sequence: Syntheticoligonucleotide
  source 1..25: mol_type = other RNA
gttggagctggtggcgtaggcaaga

SEQ ID NO: 4655 - RNA, 25 nt, synthetic construct
  misc_feature 1..25: note = Description of Artificial Sequence: Syntheticoligonucleotide
  source 1..25: mol_type = other RNA
ttggagctggtggcgtaggcaagag

SEQ ID NO: 4656 - DNA, 25 bp, synthetic construct
  misc_feature 1..25: note = Description of Artificial Sequence: Syntheticoligonucleotide
  misc_feature 1..25: note = Description of Combined DNA/RNA Molecule: Syntheticoligonucleotide
  source 1..25: mol_type = other DNA
  modified_base order(1,7,10,15): mod_base = OTHER; note = Uracil
tggagctggtggcgtaggcaagagt

SEQ ID NO: 4657 - DNA, 25 bp, synthetic construct
  misc_feature 1..25: note = Description of Artificial Sequence: Syntheticoligonucleotide
  misc_feature 1..25: note = Description of Combined DNA/RNA Molecule: Syntheticoligonucleotide
  source 1..25: mol_type = other DNA
  modified_base order(6,9,14): mod_base = OTHER; note = Uracil
ggagctggtggcgtaggcaagagtg

SEQ ID NO: 4658 - RNA, 25 nt, synthetic construct
  misc_feature 1..25: note = Description of Artificial Sequence: Syntheticoligonucleotide
  source 1..25: mol_type = other RNA
gagctggtggcgtaggcaagagtgc

SEQ ID NO: 4659 - RNA, 25 nt, synthetic construct
  misc_feature 1..25: note = Description of Artificial Sequence: Syntheticoligonucleotide
  source 1..25: mol_type = other RNA
agctggtggcgtaggcaagagtgcc

SEQ ID NO: 4660 - DNA, 25 bp, synthetic construct
  misc_feature 1..25: note = Description of Artificial Sequence: Syntheticoligonucleotide
  misc_feature 1..25: note = Description of Combined DNA/RNA Molecule: Syntheticoligonucleotide
  source 1..25: mol_type = other DNA
  modified_base order(3,6,11,21): mod_base = OTHER; note = Uracil
gctggtggcgtaggcaagagtgcct

SEQ ID NO: 4661 - DNA, 25 bp, synthetic construct
  misc_feature 1..25: note = Description of Artificial Sequence: Syntheticoligonucleotide
  misc_feature 1..25: note = Description of Combined DNA/RNA Molecule: Syntheticoligonucleotide
  source 1..25: mol_type = other DNA
  modified_base order(1,7,10,11,17,20,21,22,23): mod_base = OTHER; note = Uracil
tacagctaattcagaatcattttgt

SEQ ID NO: 4662 - DNA, 25 bp, synthetic construct
  misc_feature 1..25: note = Description of Artificial Sequence: Syntheticoligonucleotide
  misc_feature 1..25: note = Description of Artificial Sequence: Syntheticoligonucleotide
  source 1..25: mol_type = other DNA
  modified_base order(1,4,5,8,18,20,22): mod_base = OTHER; note = Uracil
taattgatggagaaacctgtctctt

SEQ ID NO: 4663 - DNA, 25 bp, synthetic construct
  misc_feature 1..25: note = Description of Artificial Sequence: Syntheticoligonucleotide
  misc_feature 1..25: note = Description of Combined DNA/RNA Molecule: Syntheticoligonucleotide
  source 1..25: mol_type = other DNA
  modified_base order(3,4,7,17,19,21,23): mod_base = OTHER; note = Uracil
aattgatggagaaacctgtctcttg

SEQ ID NO: 4664 - DNA, 25 bp, synthetic construct
  misc_feature 1..25: note = Description of Artificial Sequence: Syntheticoligonucleotide
  misc_feature 1..25: note = Description of Combined DNA/RNA Molecule: Syntheticoligonucleotide
  source 1..25: mol_type = other DNA
  modified_base order(3,13,15,17,19,20): mod_base = OTHER; note = Uracil
gatggagaaacctgtctcttggata

SEQ ID NO: 4665 - RNA, 25 nt, synthetic construct
  misc_feature 1..25: note = Description of Artificial Sequence: Syntheticoligonucleotide
  source 1..25: mol_type = other RNA
cctgtctcttggatattctcgacac

SEQ ID NO: 4666 - RNA, 25 nt, synthetic construct
  misc_feature 1..25: note = Description of Artificial Sequence: Syntheticoligonucleotide
  source 1..25: mol_type = other RNA
tgtctcttggatattctcgacacag

SEQ ID NO: 4667 - RNA, 25 nt, synthetic construct
  misc_feature 1..25: note = Description of Artificial Sequence: Syntheticoligonucleotide
  source 1..25: mol_type = other RNA
gtctcttggatattctcgacacagc

SEQ ID NO: 4668 - RNA, 25 nt, synthetic construct
  misc_feature 1..25: note = Description of Artificial Sequence: Syntheticoligonucleotide
  source 1..25: mol_type = other RNA
tctcttggatattctcgacacagca

SEQ ID NO: 4669 - RNA, 25 nt, synthetic construct
  misc_feature 1..25: note = Description of Artificial Sequence: Syntheticoligonucleotide
  source 1..25: mol_type = other RNA
ctcttggatattctcgacacagcag

SEQ ID NO: 4670 - RNA, 25 nt, synthetic construct
  misc_feature 1..25: note = Description of Artificial Sequence: Syntheticoligonucleotide
  source 1..25: mol_type = other RNA
tcttggatattctcgacacagcagg

SEQ ID NO: 4671 - DNA, 25 bp, synthetic construct
  misc_feature 1..25: note = Description of Artificial Sequence: Syntheticoligonucleotide
  misc_feature 1..25: note = Description of Combined DNA/RNA Molecule: Syntheticoligonucleotide
  source 1..25: mol_type = other DNA
  modified_base order(2,3,7,9,10,12): mod_base = OTHER; note = Uracil
cttggatattctcgacacagcaggt

SEQ ID NO: 4672 - DNA, 25 bp, synthetic construct
  misc_feature 1..25: note = Description of Artificial Sequence: Syntheticoligonucleotide
  misc_feature 1..25: note = Description of Combined DNA/RNA Molecule: Syntheticoligonucleotide
  source 1..25: mol_type = other DNA
  modified_base order(1,2,6,8,9,11): mod_base = OTHER; note = Uracil
ttggatattctcgacacagcaggtc

SEQ ID NO: 4673 - RNA, 25 nt, synthetic construct
  misc_feature 1..25: note = Description of Artificial Sequence: Syntheticoligonucleotide
  source 1..25: mol_type = other RNA
cagcaggtcaagaggagtacagtgc

SEQ ID NO: 4674 - RNA, 25 nt, synthetic construct
  misc_feature 1..25: note = Description of Artificial Sequence: Syntheticoligonucleotide
  source 1..25: mol_type = other RNA
agcaggtcaagaggagtacagtgca

SEQ ID NO: 4675 - RNA, 25 nt, synthetic construct
  misc_feature 1..25: note = Description of Artificial Sequence: Syntheticoligonucleotide
  source 1..25: mol_type = other RNA
gcaggtcaagaggagtacagtgcaa

SEQ ID NO: 4676 - RNA, 25 nt, synthetic construct
  misc_feature 1..25: note = Description of Artificial Sequence: Syntheticoligonucleotide
  source 1..25: mol_type = other RNA
aggagtacagtgcaatgagggacca

SEQ ID NO: 4677 - RNA, 25 nt, synthetic construct
  misc_feature 1..25: note = Description of Artificial Sequence: Syntheticoligonucleotide
  source 1..25: mol_type = other RNA
ggagtacagtgcaatgagggaccag

SEQ ID NO: 4678 - DNA, 25 bp, synthetic construct
  misc_feature 1..25: note = Description of Artificial Sequence: Syntheticoligonucleotide
  misc_feature 1..25: note = Description of Combined DNA/RNA Molecule: Syntheticoligonucleotide
  source 1..25: mol_type = other DNA
  modified_base order(4,9,14): mod_base = OTHER; note = Uracil
gagtacagtgcaatgagggaccagt

SEQ ID NO: 4679 - DNA, 25 bp, synthetic construct
  misc_feature 1..25: note = Description of Artificial Sequence: Syntheticoligonucleotide
  misc_feature 1..25: note = Description of Combined DNA/RNA Molecule: Syntheticoligonucleotide
  source 1..25: mol_type = other DNA
  modified_base order(3,8,13): mod_base = OTHER; note = Uracil
agtacagtgcaatgagggaccagta

SEQ ID NO: 4680 - RNA, 25 nt, synthetic construct
  misc_feature 1..25: note = Description of Artificial Sequence: Syntheticoligonucleotide
  source 1..25: mol_type = other RNA
gtacagtgcaatgagggaccagtac

SEQ ID NO: 4681 - RNA, 25 nt, synthetic construct
  misc_feature 1..25: note = Description of Artificial Sequence: Syntheticoligonucleotide
  source 1..25: mol_type = other RNA
tacagtgcaatgagggaccagtaca

SEQ ID NO: 4682 - DNA, 25 bp, synthetic construct
  misc_feature 1..25: note = Description of Artificial Sequence: Syntheticoligonucleotide
  misc_feature 1..25: note = Description of Combined DNA/RNA Molecule: Syntheticoligonucleotide
  source 1..25: mol_type = other DNA
  modified_base order(5,10,21): mod_base = OTHER; note = Uracil
acagtgcaatgagggaccagtacat

SEQ ID NO: 4683 - DNA, 25 bp, synthetic construct
  misc_feature 1..25: note = Description of Artificial Sequence: Syntheticoligonucleotide
  misc_feature 1..25: note = Description of Combined DNA/RNA Molecule: Syntheticoligonucleotide
  source 1..25: mol_type = other DNA
  modified_base order(4,9,20): mod_base = OTHER; note = Uracil
cagtgcaatgagggaccagtacatg

SEQ ID NO: 4684 - RNA, 25 nt, synthetic construct
  misc_feature 1..25: note = Description of Artificial Sequence: Syntheticoligonucleotide
  source 1..25: mol_type = other RNA
agtgcaatgagggaccagtacatga

SEQ ID NO: 4685 - DNA, 25 bp, synthetic construct
  misc_feature 1..25: note = Description of Artificial Sequence: Syntheticoligonucleotide
  misc_feature 1..25: note = Description of Combined DNA/RNA Molecule: Syntheticoligonucleotide
  source 1..25: mol_type = other DNA
  modified_base order(2,4,5,6,11,15,18,21): mod_base = OTHER; note = Uracil
gtatttgccataaataatactaaat

SEQ ID NO: 4686 - DNA, 25 bp, synthetic construct
  misc_feature 1..25: note = Description of Artificial Sequence: Syntheticoligonucleotide
  misc_feature 1..25: note = Description of Combined DNA/RNA Molecule: Syntheticoligonucleotide
  source 1..25: mol_type = other DNA
  modified_base order(1,3,4,5,10,14,17,20): mod_base = OTHER; note = Uracil
tatttgccataaataatactaaatc

SEQ ID NO: 4687 - RNA, 25 nt, synthetic construct
  misc_feature 1..25: note = Description of Artificial Sequence: Syntheticoligonucleotide
  source 1..25: mol_type = other RNA
atttgccataaataatactaaatca

SEQ ID NO: 4688 - DNA, 25 bp, synthetic construct
  misc_feature 1..25: note = Description of Artificial Sequence: Syntheticoligonucleotide
  misc_feature 1..25: note = Description of Combined DNA/RNA Molecule: Syntheticoligonucleotide
  source 1..25: mol_type = other DNA
  modified_base order(1,2,3,8,12,15,18,22): mod_base = OTHER; note = Uracil
tttgccataaataatactaaatcat

SEQ ID NO: 4689 - DNA, 25 bp, synthetic construct
  misc_feature 1..25: note = Description of Artificial Sequence: Syntheticoligonucleotide
  misc_feature 1..25: note = Description of Combined DNA/RNA Molecule: Syntheticoligonucleotide
  source 1..25: mol_type = other DNA
  modified_base order(1,2,7,11,14,17,21): mod_base = OTHER; note = Uracil
ttgccataaataatactaaatcatt

SEQ ID NO: 4690 - DNA, 25 bp, synthetic construct
  misc_feature 1..25: note = Description of Artificial Sequence: Syntheticoligonucleotide
  misc_feature 1..25: note = Description of Combined DNA/RNA Molecule: Syntheticoligonucleotide
  source 1..25: mol_type = other DNA
  modified_base order(1,6,10,13,16,20,23): mod_base = OTHER; note = Uracil
tgccataaataatactaaatcattt

SEQ ID NO: 4691 - DNA, 25 bp, synthetic construct
  misc_feature 1..25: note = Description of Artificial Sequence: Syntheticoligonucleotide
  misc_feature 1..25: note = Description of Combined DNA/RNA Molecule: Syntheticoligonucleotide
  source 1..25: mol_type = other DNA
  modified_base order(5,9,12,15,19,22,23): mod_base = OTHER; note = Uracil
gccataaataatactaaatcatttg

SEQ ID NO: 4692 - RNA, 25 nt, synthetic construct
  misc_feature 1..25: note = Description of Artificial Sequence: Syntheticoligonucleotide
  source 1..25: mol_type = other RNA
atactaaatcatttgaagatattca

SEQ ID NO: 4693 - RNA, 25 nt, synthetic construct
  misc_feature 1..25: note = Description of Artificial Sequence: Syntheticoligonucleotide
  source 1..25: mol_type = other RNA
tactaaatcatttgaagatattcac

SEQ ID NO: 4694 - RNA, 25 nt, synthetic construct
  misc_feature 1..25: note = Description of Artificial Sequence: Syntheticoligonucleotide
  source 1..25: mol_type = other RNA
actaaatcatttgaagatattcacc

SEQ ID NO: 4695 - RNA, 25 nt, synthetic construct
  misc_feature 1..25: note = Description of Artificial Sequence: Syntheticoligonucleotide
  source 1..25: mol_type = other RNA
ctaaatcatttgaagatattcacca

SEQ ID NO: 4696 - DNA, 25 bp, synthetic construct
  misc_feature 1..25: note = Description of Artificial Sequence: Syntheticoligonucleotide
  misc_feature 1..25: note = Description of Combined DNA/RNA Molecule: Syntheticoligonucleotide
  source 1..25: mol_type = other DNA
  modified_base order(1,5,8,9,10,16,18,19): mod_base = OTHER; note = Uracil
taaatcatttgaagatattcaccat

SEQ ID NO: 4697 - DNA, 25 bp, synthetic construct
  misc_feature 1..25: note = Description of Artificial Sequence: Syntheticoligonucleotide
  misc_feature 1..25: note = Description of Combined DNA/RNA Molecule: Syntheticoligonucleotide
  source 1..25: mol_type = other DNA
  modified_base order(4,7,8,9,15,17,18): mod_base = OTHER; note = Uracil
aaatcatttgaagatattcaccatt

SEQ ID NO: 4698 - DNA, 25 bp, synthetic construct
  misc_feature 1..25: note = Description of Artificial Sequence: Syntheticoligonucleotide
  misc_feature 1..25: note = Description of Combined DNA/RNA Molecule: Syntheticoligonucleotide
  source 1..25: mol_type = other DNA
  modified_base order(3,6,7,8,14,16,17,23): mod_base = OTHER; note = Uracil
aatcatttgaagatattcaccatta

SEQ ID NO: 4699 - DNA, 25 bp, synthetic construct
  misc_feature 1..25: note = Description of Artificial Sequence: Syntheticoligonucleotide
  misc_feature 1..25: note = Description of Combined DNA/RNA Molecule: Syntheticoligonucleotide
  source 1..25: mol_type = other DNA
  modified_base order(2,5,6,7,13,15,16,22,23): mod_base = OTHER; note = Uracil
atcatttgaagatattcaccattat

SEQ ID NO: 4700 - DNA, 25 bp, synthetic construct
  misc_feature 1..25: note = Description of Artificial Sequence: Syntheticoligonucleotide
  misc_feature 1..25: note = Description of Combined DNA/RNA Molecule: Syntheticoligonucleotide
  source 1..25: mol_type = other DNA
  modified_base order(1,4,5,6,12,14,15,21,22): mod_base = OTHER; note = Uracil
tcatttgaagatattcaccattata

SEQ ID NO: 4701 - DNA, 25 bp, synthetic construct
  misc_feature 1..25: note = Description of Artificial Sequence: Syntheticoligonucleotide
  misc_feature 1..25: note = Description of Combined DNA/RNA Molecule: Syntheticoligonucleotide
  source 1..25: mol_type = other DNA
  modified_base order(2,4,5,11,12,14): mod_base = OTHER; note = Uracil
atattcaccattatagagaacaaat

SEQ ID NO: 4702 - DNA, 25 bp, synthetic construct
  misc_feature 1..25: note = Description of Artificial Sequence: Syntheticoligonucleotide
  misc_feature 1..25: note = Description of Combined DNA/RNA Molecule: Syntheticoligonucleotide
  source 1..25: mol_type = other DNA
  modified_base order(1,3,4,10,11,13): mod_base = OTHER; note = Uracil
tattcaccattatagagaacaaatt

SEQ ID NO: 4703 - DNA, 25 bp, synthetic construct
  misc_feature 1..25: note = Description of Artificial Sequence: Syntheticoligonucleotide
  misc_feature 1..25: note = Description of Combined DNA/RNA Molecule: Syntheticoligonucleotide
  source 1..25: mol_type = other DNA
  modified_base order(2,3,9,10,12,23): mod_base = OTHER; note = Uracil
attcaccattatagagaacaaatta

SEQ ID NO: 4704 - RNA, 25 nt, synthetic construct
  misc_feature 1..25: note = Description of Artificial Sequence: Syntheticoligonucleotide
  source 1..25: mol_type = other RNA
ttcaccattatagagaacaaattaa

SEQ ID NO: 4705 - RNA, 25 nt, synthetic construct
  misc_feature 1..25: note = Description of Artificial Sequence: Syntheticoligonucleotide
  source 1..25: mol_type = other RNA
tcaccattatagagaacaaattaaa

SEQ ID NO: 4706 - RNA, 25 nt, synthetic construct
  misc_feature 1..25: note = Description of Artificial Sequence: Syntheticoligonucleotide
  source 1..25: mol_type = other RNA
caccattatagagaacaaattaaaa

SEQ ID NO: 4707 - RNA, 25 nt, synthetic construct
  misc_feature 1..25: note = Description of Artificial Sequence: Syntheticoligonucleotide
  source 1..25: mol_type = other RNA
accattatagagaacaaattaaaag

SEQ ID NO: 4708 - RNA, 25 nt, synthetic construct
  misc_feature 1..25: note = Description of Artificial Sequence: Syntheticoligonucleotide
  source 1..25: mol_type = other RNA
ccattatagagaacaaattaaaaga

SEQ ID NO: 4709 - RNA, 25 nt, synthetic construct
  misc_feature 1..25: note = Description of Artificial Sequence: Syntheticoligonucleotide
  source 1..25: mol_type = other RNA
cattatagagaacaaattaaaagag

SEQ ID NO: 4710 - DNA, 25 bp, synthetic construct
  misc_feature 1..25: note = Description of Artificial Sequence: Syntheticoligonucleotide
  misc_feature 1..25: note = Description of Combined DNA/RNA Molecule: Syntheticoligonucleotide
  source 1..25: mol_type = other DNA
  modified_base order(2,4,7,10,13,20): mod_base = OTHER; note = Uracil
ctatggtcctagtaggaaataaatg

SEQ ID NO: 4711 - RNA, 25 nt, synthetic construct
  misc_feature 1..25: note = Description of Artificial Sequence: Syntheticoligonucleotide
  source 1..25: mol_type = other RNA
tgtgatttgccttctagaacagtag

SEQ ID NO: 4712 - RNA, 25 nt, synthetic construct
  misc_feature 1..25: note = Description of Artificial Sequence: Syntheticoligonucleotide
  source 1..25: mol_type = other RNA
gtgatttgccttctagaacagtaga

SEQ ID NO: 4713 - RNA, 25 nt, synthetic construct
  misc_feature 1..25: note = Description of Artificial Sequence: Syntheticoligonucleotide
  source 1..25: mol_type = other RNA
gatttgccttctagaacagtagaca

SEQ ID NO: 4714 - RNA, 25 nt, synthetic construct
  misc_feature 1..25: note = Description of Artificial Sequence: Syntheticoligonucleotide
  source 1..25: mol_type = other RNA
gttatggaattccttttattgaaac

SEQ ID NO: 4715 - RNA, 25 nt, synthetic construct
  misc_feature 1..25: note = Description of Artificial Sequence: Syntheticoligonucleotide
  source 1..25: mol_type = other RNA
ttatggaattccttttattgaaaca

SEQ ID NO: 4716 - DNA, 25 bp, synthetic construct
  misc_feature 1..25: note = Description of Artificial Sequence: Syntheticoligonucleotide
  misc_feature 1..25: note = Description of Combined DNA/RNA Molecule: Syntheticoligonucleotide
  source 1..25: mol_type = other DNA
  modified_base order(1,3,8,9,12,13,14,15,17,18): mod_base = OTHER; note = Uracil
tatggaattccttttattgaaacat

SEQ ID NO: 4717 - RNA, 25 nt, synthetic construct
  misc_feature 1..25: note = Description of Artificial Sequence: Syntheticoligonucleotide
  source 1..25: mol_type = other RNA
gatgccttctatacattagttcgag

SEQ ID NO: 4718 - RNA, 25 nt, synthetic construct
  misc_feature 1..25: note = Description of Artificial Sequence: Syntheticoligonucleotide
  source 1..25: mol_type = other RNA
atgccttctatacattagttcgaga

SEQ ID NO: 4719 - RNA, 25 nt, synthetic construct
  misc_feature 1..25: note = Description of Artificial Sequence: Syntheticoligonucleotide
  source 1..25: mol_type = other RNA
cgagaaattcgaaaacataaagaaa

SEQ ID NO: 4720 - RNA, 25 nt, synthetic construct
  misc_feature 1..25: note = Description of Artificial Sequence: Syntheticoligonucleotide
  source 1..25: mol_type = other RNA
gaaaacataaagaaaagatgagcaa

SEQ ID NO: 4721 - RNA, 25 nt, synthetic construct
  misc_feature 1..25: note = Description of Artificial Sequence: Syntheticoligonucleotide
  source 1..25: mol_type = other RNA
aaaacataaagaaaagatgagcaaa

SEQ ID NO: 4722 - RNA, 25 nt, synthetic construct
  misc_feature 1..25: note = Description of Artificial Sequence: Syntheticoligonucleotide
  source 1..25: mol_type = other RNA
aaacataaagaaaagatgagcaaag

SEQ ID NO: 4723 - RNA, 25 nt, synthetic construct
  misc_feature 1..25: note = Description of Artificial Sequence: Syntheticoligonucleotide
  source 1..25: mol_type = other RNA
aacataaagaaaagatgagcaaaga

SEQ ID NO: 4724 - DNA, 25 bp, synthetic construct
  misc_feature 1..25: note = Description of Artificial Sequence: Syntheticoligonucleotide
  misc_feature 1..25: note = Description of Combined DNA/RNA Molecule: Syntheticoligonucleotide
  source 1..25: mol_type = other DNA
  modified_base order(4,15): mod_base = OTHER; note = Uracil
acataaagaaaagatgagcaaagat

SEQ ID NO: 4725 - DNA, 25 bp, synthetic construct
  misc_feature 1..25: note = Description of Artificial Sequence: Syntheticoligonucleotide
  misc_feature 1..25: note = Description of Combined DNA/RNA Molecule: Syntheticoligonucleotide
  source 1..25: mol_type = other DNA
  modified_base order(3,14): mod_base = OTHER; note = Uracil
cataaagaaaagatgagcaaagatg

SEQ ID NO: 4726 - RNA, 25 nt, synthetic construct
  misc_feature 1..25: note = Description of Artificial Sequence: Syntheticoligonucleotide
  source 1..25: mol_type = other RNA
ataaagaaaagatgagcaaagatgg

SEQ ID NO: 4727 - DNA, 25 bp, synthetic construct
  misc_feature 1..25: note = Description of Artificial Sequence: Syntheticoligonucleotide
  misc_feature 1..25: note = Description of Combined DNA/RNA Molecule: Syntheticoligonucleotide
  source 1..25: mol_type = other DNA
  modified_base order(1,12,22): mod_base = OTHER; note = Uracil
taaagaaaagatgagcaaagatggt

SEQ ID NO: 4728 - DNA, 25 bp, synthetic construct
  misc_feature 1..25: note = Description of Artificial Sequence: Syntheticoligonucleotide
  misc_feature 1..25: note = Description of Combined DNA/RNA Molecule: Syntheticoligonucleotide
  source 1..25: mol_type = other DNA
  modified_base order(11,21): mod_base = OTHER; note = Uracil
aaagaaaagatgagcaaagatggta

SEQ ID NO: 4729 - RNA, 25 nt, synthetic construct
  misc_feature 1..25: note = Description of Artificial Sequence: Syntheticoligonucleotide
  source 1..25: mol_type = other RNA
aagtggtaatttttgtacattacac

SEQ ID NO: 4730 - DNA, 25 bp, synthetic construct
  misc_feature 1..25: note = Description of Artificial Sequence: Syntheticoligonucleotide
  misc_feature 1..25: note = Description of Combined DNA/RNA Molecule: Syntheticoligonucleotide
  source 1..25: mol_type = other DNA
  modified_base order(3,6,9,10,11,12,13,15,19,20): mod_base = OTHER; note = Uracil
agtggtaatttttgtacattacact

SEQ ID NO: 4731 - RNA, 25 nt, synthetic construct
  misc_feature 1..25: note = Description of Artificial Sequence: Syntheticoligonucleotide
  source 1..25: mol_type = other RNA
ttgtacattacactaaattattagc

SEQ ID NO: 4732 - RNA, 25 nt, synthetic construct
  misc_feature 1..25: note = Description of Artificial Sequence: Syntheticoligonucleotide
  source 1..25: mol_type = other RNA
tgtacattacactaaattattagca

SEQ ID NO: 4733 - DNA, 25 bp, synthetic construct
  misc_feature 1..25: note = Description of Artificial Sequence: Syntheticoligonucleotide
  misc_feature 1..25: note = Description of Combined DNA/RNA Molecule: Syntheticoligonucleotide
  source 1..25: mol_type = other DNA
  modified_base order(2,6,7,12,16,17,19,20): mod_base = OTHER; note = Uracil
gtacattacactaaattattagcat

SEQ ID NO: 4734 - DNA, 25 bp, synthetic construct
  misc_feature 1..25: note = Description of Artificial Sequence: Syntheticoligonucleotide
  misc_feature 1..25: note = Description of Combined DNA/RNA Molecule: Syntheticoligonucleotide
  source 1..25: mol_type = other DNA
  modified_base order(1,5,6,11,15,16,18,19): mod_base = OTHER; note = Uracil
tacattacactaaattattagcatt

SEQ ID NO: 4735 - DNA, 25 bp, synthetic construct
  misc_feature 1..25: note = Description of Artificial Sequence: Syntheticoligonucleotide
  misc_feature 1..25: note = Description of Combined DNA/RNA Molecule: Syntheticoligonucleotide
  source 1..25: mol_type = other DNA
  modified_base order(4,5,10,14,15,17,18,23): mod_base = OTHER; note = Uracil
acattacactaaattattagcattt

SEQ ID NO: 4736 - DNA, 25 bp, synthetic construct
  misc_feature 1..25: note = Description of Artificial Sequence: Syntheticoligonucleotide
  misc_feature 1..25: note = Description of Combined DNA/RNA Molecule: Syntheticoligonucleotide
  source 1..25: mol_type = other DNA
  modified_base order(3,4,9,13,14,16,17,22,23): mod_base = OTHER; note = Uracil
cattacactaaattattagcatttg

SEQ ID NO: 4737 - DNA, 25 bp, synthetic construct
  misc_feature 1..25: note = Description of Artificial Sequence: Syntheticoligonucleotide
  misc_feature 1..25: note = Description of Combined DNA/RNA Molecule: Syntheticoligonucleotide
  source 1..25: mol_type = other DNA
  modified_base order(2,3,8,12,13,15,16,21,22,23): mod_base = OTHER; note = Uracil
attacactaaattattagcatttgt

SEQ ID NO: 4738 - DNA, 25 bp, synthetic construct
  misc_feature 1..25: note = Description of Artificial Sequence: Syntheticoligonucleotide
  misc_feature 1..25: note = Description of Combined DNA/RNA Molecule: Syntheticoligonucleotide
  source 1..25: mol_type = other DNA
  modified_base order(1,2,7,11,12,14,15,20,21,22): mod_base = OTHER; note = Uracil
ttacactaaattattagcatttgtt

SEQ ID NO: 4739 - DNA, 25 bp, synthetic construct
  misc_feature 1..25: note = Description of Artificial Sequence: Syntheticoligonucleotide
  misc_feature 1..25: note = Description of Combined DNA/RNA Molecule: Syntheticoligonucleotide
  source 1..25: mol_type = other DNA
  modified_base order(1,6,10,11,13,14,19,20,21,23): mod_base = OTHER; note = Uracil
tacactaaattattagcatttgttt

SEQ ID NO: 4740 - RNA, 25 nt, synthetic construct
  misc_feature 1..25: note = Description of Artificial Sequence: Syntheticoligonucleotide
  source 1..25: mol_type = other RNA
tattagcatttgttttagcattacc

SEQ ID NO: 4741 - DNA, 25 bp, synthetic construct
  misc_feature 1..25: note = Description of Artificial Sequence: Syntheticoligonucleotide
  misc_feature 1..25: note = Description of Combined DNA/RNA Molecule: Syntheticoligonucleotide
  source 1..25: mol_type = other DNA
  modified_base order(2,3,8,9,10,12,13,14,15,20,21): mod_base = OTHER; note = Uracil
attagcatttgttttagcattacct

SEQ ID NO: 4742 - DNA, 25 bp, synthetic construct
  misc_feature 1..25: note = Description of Artificial Sequence: Syntheticoligonucleotide
  misc_feature 1..25: note = Description of Combined DNA/RNA Molecule: Syntheticoligonucleotide
  source 1..25: mol_type = other DNA
  modified_base order(1,2,7,8,9,11,12,13,14,19,20): mod_base = OTHER; note = Uracil
ttagcatttgttttagcattaccta

SEQ ID NO: 4743 - RNA, 25 nt, synthetic construct
  misc_feature 1..25: note = Description of Artificial Sequence: Syntheticoligonucleotide
  source 1..25: mol_type = other RNA
tagcatttgttttagcattacctaa

SEQ ID NO: 4744 - DNA, 25 bp, synthetic construct
  misc_feature 1..25: note = Description of Artificial Sequence: Syntheticoligonucleotide
  misc_feature 1..25: note = Description of Combined DNA/RNA Molecule: Syntheticoligonucleotide
  source 1..25: mol_type = other DNA
  modified_base order(5,6,7,9,10,11,12,17,18,22): mod_base = OTHER; note = Uracil
agcatttgttttagcattacctaat

SEQ ID NO: 4745 - DNA, 25 bp, synthetic construct
  misc_feature 1..25: note = Description of Artificial Sequence: Syntheticoligonucleotide
  misc_feature 1..25: note = Description of Combined DNA/RNA Molecule: Syntheticoligonucleotide
  source 1..25: mol_type = other DNA
  modified_base order(4,5,6,8,9,10,11,16,17,21): mod_base = OTHER; note = Uracil
gcatttgttttagcattacctaatt

SEQ ID NO: 4746 - DNA, 25 bp, synthetic construct
  misc_feature 1..25: note = Description of Artificial Sequence: Syntheticoligonucleotide
  misc_feature 1..25: note = Description of Combined DNA/RNA Molecule: Syntheticoligonucleotide
  source 1..25: mol_type = other DNA
  modified_base order(3,4,5,7,8,9,10,15,16,20,23): mod_base = OTHER; note = Uracil
catttgttttagcattacctaattt

SEQ ID NO: 4747 - DNA, 25 bp, synthetic construct
  misc_feature 1..25: note = Description of Artificial Sequence: Syntheticoligonucleotide
  misc_feature 1..25: note = Description of Combined DNA/RNA Molecule: Syntheticoligonucleotide
  source 1..25: mol_type = other DNA
  modified_base order(2,3,4,6,7,8,9,14,15,19,22,23): mod_base = OTHER; note = Uracil
atttgttttagcattacctaatttt

SEQ ID NO: 4748 - DNA, 25 bp, synthetic construct
  misc_feature 1..25: note = Description of Artificial Sequence: Syntheticoligonucleotide
  misc_feature 1..25: note = Description of Combined DNA/RNA Molecule: Syntheticoligonucleotide
  source 1..25: mol_type = other DNA
  modified_base order(1,2,3,5,6,7,8,13,14,18,21,22,23): mod_base = OTHER; note = Uracil
tttgttttagcattacctaattttt

SEQ ID NO: 4749 - DNA, 25 bp, synthetic construct
  misc_feature 1..25: note = Description of Artificial Sequence: Syntheticoligonucleotide
  misc_feature 1..25: note = Description of Combined DNA/RNA Molecule: Syntheticoligonucleotide
  source 1..25: mol_type = other DNA
  modified_base order(2,3,5,6,7,8,13,19): mod_base = OTHER; note = Uracil
cttattttaaaatgacagtggaagt

SEQ ID NO: 4750 - DNA, 25 bp, synthetic construct
  misc_feature 1..25: note = Description of Artificial Sequence: Syntheticoligonucleotide
  misc_feature 1..25: note = Description of Combined DNA/RNA Molecule: Syntheticoligonucleotide
  source 1..25: mol_type = other DNA
  modified_base order(1,3,4,5,6,11,17,23): mod_base = OTHER; note = Uracil
tattttaaaatgacagtggaagttt

SEQ ID NO: 4751 - DNA, 25 bp, synthetic construct
  misc_feature 1..25: note = Description of Artificial Sequence: Syntheticoligonucleotide
  misc_feature 1..25: note = Description of Combined DNA/RNA Molecule: Syntheticoligonucleotide
  source 1..25: mol_type = other DNA
  modified_base order(1,3,7,13,15,16): mod_base = OTHER; note = Uracil
tctaagtgccagtattcccagagtt

SEQ ID NO: 4752 - DNA, 25 bp, synthetic construct
  misc_feature 1..25: note = Description of Artificial Sequence: Syntheticoligonucleotide
  misc_feature 1..25: note = Description of Combined DNA/RNA Molecule: Syntheticoligonucleotide
  source 1..25: mol_type = other DNA
  modified_base order(5,6,9,15,16,17,18,22): mod_base = OTHER; note = Uracil
caaattaatgaagcttttgaatcat

SEQ ID NO: 4753 - DNA, 25 bp, synthetic construct
  misc_feature 1..25: note = Description of Artificial Sequence: Syntheticoligonucleotide
  misc_feature 1..25: note = Description of Combined DNA/RNA Molecule: Syntheticoligonucleotide
  source 1..25: mol_type = other DNA
  modified_base order(4,5,8,14,15,16,17,21): mod_base = OTHER; note = Uracil
aaattaatgaagcttttgaatcatc

SEQ ID NO: 4754 - DNA, 25 bp, synthetic construct
  misc_feature 1..25: note = Description of Artificial Sequence: Syntheticoligonucleotide
  misc_feature 1..25: note = Description of Combined DNA/RNA Molecule: Syntheticoligonucleotide
  source 1..25: mol_type = other DNA
  modified_base order(1,3,5,6,7,8,10,12,15,20): mod_base = OTHER; note = Uracil
tgtgttttatctagtcacataaatg

SEQ ID NO: 4755 - RNA, 25 nt, synthetic construct
  misc_feature 1..25: note = Description of Artificial Sequence: Syntheticoligonucleotide
  source 1..25: mol_type = other RNA
gtgttttatctagtcacataaatgg

SEQ ID NO: 4756 - DNA, 25 bp, synthetic construct
  misc_feature 1..25: note = Description of Artificial Sequence: Syntheticoligonucleotide
  misc_feature 1..25: note = Description of Combined DNA/RNA Molecule: Syntheticoligonucleotide
  source 1..25: mol_type = other DNA
  modified_base order(1,2,3,4,6,8,11,16,20): mod_base = OTHER; note = Uracil
ttttatctagtcacataaatggatt

SEQ ID NO: 4757 - RNA, 25 nt, synthetic construct
  misc_feature 1..25: note = Description of Artificial Sequence: Syntheticoligonucleotide
  source 1..25: mol_type = other RNA
taaatggattaattactaatttcag

SEQ ID NO: 4758 - DNA, 25 bp, synthetic construct
  misc_feature 1..25: note = Description of Artificial Sequence: Syntheticoligonucleotide
  misc_feature 1..25: note = Description of Combined DNA/RNA Molecule: Syntheticoligonucleotide
  source 1..25: mol_type = other DNA
  modified_base order(4,8,9,12,13,16,19,20,21): mod_base = OTHER; note = Uracil
aaatggattaattactaatttcagt

SEQ ID NO: 4759 - RNA, 25 nt, synthetic construct
  misc_feature 1..25: note = Description of Artificial Sequence: Syntheticoligonucleotide
  source 1..25: mol_type = other RNA
attggtttttactgaaacattgagg

SEQ ID NO: 4760 - DNA, 25 bp, synthetic construct
  misc_feature 1..25: note = Description of Artificial Sequence: Syntheticoligonucleotide
  misc_feature 1..25: note = Description of Combined DNA/RNA Molecule: Syntheticoligonucleotide
  source 1..25: mol_type = other DNA
  modified_base order(3,4,5,8,9,10,11,16,17,21): mod_base = OTHER; note = Uracil
catttccttttcacattagataaat

SEQ ID NO: 4761 - DNA, 25 bp, synthetic construct
  misc_feature 1..25: note = Description of Artificial Sequence: Syntheticoligonucleotide
  misc_feature 1..25: note = Description of Combined DNA/RNA Molecule: Syntheticoligonucleotide
  source 1..25: mol_type = other DNA
  modified_base order(2,3,4,5,10,11,15,19,20,23): mod_base = OTHER; note = Uracil
cttttcacattagataaattactat

SEQ ID NO: 4762 - DNA, 25 bp, synthetic construct
  misc_feature 1..25: note = Description of Artificial Sequence: Syntheticoligonucleotide
  misc_feature 1..25: note = Description of Combined DNA/RNA Molecule: Syntheticoligonucleotide
  source 1..25: mol_type = other DNA
  modified_base order(3,4,8,12,13,16,18): mod_base = OTHER; note = Uracil
cattagataaattactataaagact

SEQ ID NO: 4763 - DNA, 25 bp, synthetic construct
  misc_feature 1..25: note = Description of Artificial Sequence: Syntheticoligonucleotide
  misc_feature 1..25: note = Description of Combined DNA/RNA Molecule: Syntheticoligonucleotide
  source 1..25: mol_type = other DNA
  modified_base order(2,3,7,11,12,15,17): mod_base = OTHER; note = Uracil
attagataaattactataaagactc

SEQ ID NO: 4764 - RNA, 25 nt, synthetic construct
  misc_feature 1..25: note = Description of Artificial Sequence: Syntheticoligonucleotide
  source 1..25: mol_type = other RNA
ttagataaattactataaagactcc

SEQ ID NO: 4765 - RNA, 25 nt, synthetic construct
  misc_feature 1..25: note = Description of Artificial Sequence: Syntheticoligonucleotide
  source 1..25: mol_type = other RNA
taaggcagacccagtatgaaatggg

SEQ ID NO: 4766 - RNA, 25 nt, synthetic construct
  misc_feature 1..25: note = Description of Artificial Sequence: Syntheticoligonucleotide
  source 1..25: mol_type = other RNA
aaggcagacccagtatgaaatgggg

SEQ ID NO: 4767 - RNA, 25 nt, synthetic construct
  misc_feature 1..25: note = Description of Artificial Sequence: Syntheticoligonucleotide
  source 1..25: mol_type = other RNA
aggcagacccagtatgaaatgggga

SEQ ID NO: 4768 - DNA, 25 bp, synthetic construct
  misc_feature 1..25: note = Description of Artificial Sequence: Syntheticoligonucleotide
  misc_feature 1..25: note = Description of Combined DNA/RNA Molecule: Syntheticoligonucleotide
  source 1..25: mol_type = other DNA
  modified_base order(12,14,19): mod_base = OTHER; note = Uracil
ggcagacccagtatgaaatggggat

SEQ ID NO: 4769 - RNA, 25 nt, synthetic construct
  misc_feature 1..25: note = Description of Artificial Sequence: Syntheticoligonucleotide
  source 1..25: mol_type = other RNA
tatgaaatggggattattatagcaa

SEQ ID NO: 4770 - RNA, 25 nt, synthetic construct
  misc_feature 1..25: note = Description of Artificial Sequence: Syntheticoligonucleotide
  source 1..25: mol_type = other RNA
gggattattatagcaaccattttgg

SEQ ID NO: 4771 - DNA, 25 bp, synthetic construct
  misc_feature 1..25: note = Description of Artificial Sequence: Syntheticoligonucleotide
  misc_feature 1..25: note = Description of Combined DNA/RNA Molecule: Syntheticoligonucleotide
  source 1..25: mol_type = other DNA
  modified_base order(5,7,9,10,11,15,18,21): mod_base = OTHER; note = Uracil
gggctatatttacatgctactaaat

SEQ ID NO: 4772 - DNA, 25 bp, synthetic construct
  misc_feature 1..25: note = Description of Artificial Sequence: Syntheticoligonucleotide
  misc_feature 1..25: note = Description of Combined DNA/RNA Molecule: Syntheticoligonucleotide
  source 1..25: mol_type = other DNA
  modified_base order(4,6,8,9,10,14,17,20): mod_base = OTHER; note = Uracil
ggctatatttacatgctactaaatt

SEQ ID NO: 4773 - DNA, 25 bp, synthetic construct
  misc_feature 1..25: note = Description of Artificial Sequence: Syntheticoligonucleotide
  misc_feature 1..25: note = Description of Combined DNA/RNA Molecule: Syntheticoligonucleotide
  source 1..25: mol_type = other DNA
  modified_base order(3,5,7,8,9,13,16,19,23): mod_base = OTHER; note = Uracil
gctatatttacatgctactaaattt

SEQ ID NO: 4774 - DNA, 25 bp, synthetic construct
  misc_feature 1..25: note = Description of Artificial Sequence: Syntheticoligonucleotide
  misc_feature 1..25: note = Description of Combined DNA/RNA Molecule: Syntheticoligonucleotide
  source 1..25: mol_type = other DNA
  modified_base order(2,4,6,7,8,12,15,18,22,23): mod_base = OTHER; note = Uracil
ctatatttacatgctactaaatttt

SEQ ID NO: 4775 - DNA, 25 bp, synthetic construct
  misc_feature 1..25: note = Description of Artificial Sequence: Syntheticoligonucleotide
  misc_feature 1..25: note = Description of Combined DNA/RNA Molecule: Syntheticoligonucleotide
  source 1..25: mol_type = other DNA
  modified_base order(1,3,5,6,7,11,14,17,21,22,23): mod_base = OTHER; note = Uracil
tatatttacatgctactaaattttt

SEQ ID NO: 4776 - DNA, 25 bp, synthetic construct
  misc_feature 1..25: note = Description of Artificial Sequence: Syntheticoligonucleotide
  misc_feature 1..25: note = Description of Combined DNA/RNA Molecule: Syntheticoligonucleotide
  source 1..25: mol_type = other DNA
  modified_base order(2,4,5,6,10,13,16,20,21,22,23): mod_base = OTHER; note = Uracil
atatttacatgctactaaattttta

SEQ ID NO: 4777 - DNA, 25 bp, synthetic construct
  misc_feature 1..25: note = Description of Artificial Sequence: Syntheticoligonucleotide
  misc_feature 1..25: note = Description of Combined DNA/RNA Molecule: Syntheticoligonucleotide
  source 1..25: mol_type = other DNA
  modified_base order(1,3,4,5,9,12,15,19,20,21,22,23): mod_base = OTHER; note = Uracil
tatttacatgctactaaatttttat

SEQ ID NO: 4778 - DNA, 25 bp, synthetic construct
  misc_feature 1..25: note = Description of Artificial Sequence: Syntheticoligonucleotide
  misc_feature 1..25: note = Description of Combined DNA/RNA Molecule: Syntheticoligonucleotide
  source 1..25: mol_type = other DNA
  modified_base order(2,3,4,8,11,14,18,19,20,21,22): mod_base = OTHER; note = Uracil
atttacatgctactaaatttttata

SEQ ID NO: 4779 - RNA, 25 nt, synthetic construct
  misc_feature 1..25: note = Description of Artificial Sequence: Syntheticoligonucleotide
  source 1..25: mol_type = other RNA
tttacatgctactaaatttttataa

SEQ ID NO: 4780 - DNA, 25 bp, synthetic construct
  misc_feature 1..25: note = Description of Artificial Sequence: Syntheticoligonucleotide
  misc_feature 1..25: note = Description of Combined DNA/RNA Molecule: Syntheticoligonucleotide
  source 1..25: mol_type = other DNA
  modified_base order(1,2,6,9,12,16,17,18,19,20,22): mod_base = OTHER; note = Uracil
ttacatgctactaaatttttataat

SEQ ID NO: 4781 - DNA, 25 bp, synthetic construct
  misc_feature 1..25: note = Description of Artificial Sequence: Syntheticoligonucleotide
  misc_feature 1..25: note = Description of Combined DNA/RNA Molecule: Syntheticoligonucleotide
  source 1..25: mol_type = other DNA
  modified_base order(1,5,8,11,15,16,17,18,19,21): mod_base = OTHER; note = Uracil
tacatgctactaaatttttataata

SEQ ID NO: 4782 - DNA, 25 bp, synthetic construct
  misc_feature 1..25: note = Description of Artificial Sequence: Syntheticoligonucleotide
  misc_feature 1..25: note = Description of Combined DNA/RNA Molecule: Syntheticoligonucleotide
  source 1..25: mol_type = other DNA
  modified_base order(2,3,4,7,10,12,16,17,18,22): mod_base = OTHER; note = Uracil
ctttcatagtataactttaaatctt

SEQ ID NO: 4783 - DNA, 25 bp, synthetic construct
  misc_feature 1..25: note = Description of Artificial Sequence: Syntheticoligonucleotide
  misc_feature 1..25: note = Description of Combined DNA/RNA Molecule: Syntheticoligonucleotide
  source 1..25: mol_type = other DNA
  modified_base order(2,5,7,11,12,13,17,19,20,21,22): mod_base = OTHER; note = Uracil
atagtataactttaaatcttttctt

SEQ ID NO: 4784 - DNA, 25 bp, synthetic construct
  misc_feature 1..25: note = Description of Artificial Sequence: Syntheticoligonucleotide
  misc_feature 1..25: note = Description of Combined DNA/RNA Molecule: Syntheticoligonucleotide
  source 1..25: mol_type = other DNA
  modified_base order(1,4,6,10,11,12,16,18,19,20,21,23): mod_base = OTHER; note = Uracil
tagtataactttaaatcttttcttc

SEQ ID NO: 4785 - DNA, 25 bp, synthetic construct
  misc_feature 1..25: note = Description of Artificial Sequence: Syntheticoligonucleotide
  misc_feature 1..25: note = Description of Combined DNA/RNA Molecule: Syntheticoligonucleotide
  source 1..25: mol_type = other DNA
  modified_base order(1,5,7,8,9,10,12,13,18,19,23): mod_base = OTHER; note = Uracil
taaatcttttcttcaacttgagtct

SEQ ID NO: 4786 - DNA, 25 bp, synthetic construct
  misc_feature 1..25: note = Description of Artificial Sequence: Syntheticoligonucleotide
  misc_feature 1..25: note = Description of Combined DNA/RNA Molecule: Syntheticoligonucleotide
  source 1..25: mol_type = other DNA
  modified_base order(4,6,7,8,9,11,12,17,18,22): mod_base = OTHER; note = Uracil
aaatcttttcttcaacttgagtctt

SEQ ID NO: 4787 - RNA, 25 nt, synthetic construct
  misc_feature 1..25: note = Description of Artificial Sequence: Syntheticoligonucleotide
  source 1..25: mol_type = other RNA
cttgagtctttgaagatagttttaa

SEQ ID NO: 4788 - DNA, 25 bp, synthetic construct
  misc_feature 1..25: note = Description of Artificial Sequence: Syntheticoligonucleotide
  misc_feature 1..25: note = Description of Combined DNA/RNA Molecule: Syntheticoligonucleotide
  source 1..25: mol_type = other DNA
  modified_base order(1,5,7,8,9,15,18,19,20,21): mod_base = OTHER; note = Uracil
tgagtctttgaagatagttttaatt

SEQ ID NO: 4789 - DNA, 25 bp, synthetic construct
  misc_feature 1..25: note = Description of Artificial Sequence: Syntheticoligonucleotide
  misc_feature 1..25: note = Description of Combined DNA/RNA Molecule: Syntheticoligonucleotide
  source 1..25: mol_type = other DNA
  modified_base order(4,6,7,8,14,17,18,19,20,23): mod_base = OTHER; note = Uracil
gagtctttgaagatagttttaattc

SEQ ID NO: 4790 - RNA, 25 nt, synthetic construct
  misc_feature 1..25: note = Description of Artificial Sequence: Syntheticoligonucleotide
  source 1..25: mol_type = other RNA
gatagttttaattctgcttgtgaca

SEQ ID NO: 4791 - DNA, 25 bp, synthetic construct
  misc_feature 1..25: note = Description of Artificial Sequence: Syntheticoligonucleotide
  misc_feature 1..25: note = Description of Combined DNA/RNA Molecule: Syntheticoligonucleotide
  source 1..25: mol_type = other DNA
  modified_base order(2,5,6,7,8,11,12,14,17,18,20): mod_base = OTHER; note = Uracil
atagttttaattctgcttgtgacat

SEQ ID NO: 4792 - DNA, 25 bp, synthetic construct
  misc_feature 1..25: note = Description of Artificial Sequence: Syntheticoligonucleotide
  misc_feature 1..25: note = Description of Combined DNA/RNA Molecule: Syntheticoligonucleotide
  source 1..25: mol_type = other DNA
  modified_base order(1,4,5,6,7,10,11,13,16,17,19): mod_base = OTHER; note = Uracil
tagttttaattctgcttgtgacatt

SEQ ID NO: 4793 - RNA, 25 nt, synthetic construct
  misc_feature 1..25: note = Description of Artificial Sequence: Syntheticoligonucleotide
  source 1..25: mol_type = other RNA
cttgtgacattaaaagattatttgg

SEQ ID NO: 4794 - DNA, 25 bp, synthetic construct
  misc_feature 1..25: note = Description of Artificial Sequence: Syntheticoligonucleotide
  misc_feature 1..25: note = Description of Combined DNA/RNA Molecule: Syntheticoligonucleotide
  source 1..25: mol_type = other DNA
  modified_base order(1,3,4,8,15,16,21,22,23): mod_base = OTHER; note = Uracil
tattaactcaaaagttgagattttg

SEQ ID NO: 4795 - DNA, 25 bp, synthetic construct
  misc_feature 1..25: note = Description of Artificial Sequence: Syntheticoligonucleotide
  misc_feature 1..25: note = Description of Combined DNA/RNA Molecule: Syntheticoligonucleotide
  source 1..25: mol_type = other DNA
  modified_base order(1,3,13,14,17,18,19,20,21,22,23): mod_base = OTHER; note = Uracil
tgtgccaagacattaattttttttt

SEQ ID NO: 4796 - RNA, 25 nt, synthetic construct
  misc_feature 1..25: note = Description of Artificial Sequence: Syntheticoligonucleotide
  source 1..25: mol_type = other RNA
tggttaaattaacattgcataaaca

SEQ ID NO: 4797 - RNA, 25 nt, synthetic construct
  misc_feature 1..25: note = Description of Artificial Sequence: Syntheticoligonucleotide
  source 1..25: mol_type = other RNA
ggttaaattaacattgcataaacac

SEQ ID NO: 4798 - DNA, 25 bp, synthetic construct
  misc_feature 1..25: note = Description of Artificial Sequence: Syntheticoligonucleotide
  misc_feature 1..25: note = Description of Combined DNA/RNA Molecule: Syntheticoligonucleotide
  source 1..25: mol_type = other DNA
  modified_base order(2,3,7,8,13,14,18): mod_base = OTHER; note = Uracil
gttaaattaacattgcataaacact

SEQ ID NO: 4799 - DNA, 25 bp, synthetic construct
  misc_feature 1..25: note = Description of Artificial Sequence: Syntheticoligonucleotide
  misc_feature 1..25: note = Description of Combined DNA/RNA Molecule: Syntheticoligonucleotide
  source 1..25: mol_type = other DNA
  modified_base order(2,3,7,14,15,16,17,22): mod_base = OTHER; note = Uracil
attgcataaacacttttcaagtctg

SEQ ID NO: 4800 - RNA, 25 nt, synthetic construct
  misc_feature 1..25: note = Description of Artificial Sequence: Syntheticoligonucleotide
  source 1..25: mol_type = other RNA
aagtctgatccatatttaataatgc

SEQ ID NO: 4801 - DNA, 25 bp, synthetic construct
  misc_feature 1..25: note = Description of Artificial Sequence: Syntheticoligonucleotide
  misc_feature 1..25: note = Description of Combined DNA/RNA Molecule: Syntheticoligonucleotide
  source 1..25: mol_type = other DNA
  modified_base order(1,6,10,15,20): mod_base = OTHER; note = Uracil
taaaataaatgaagtgagatggcat

SEQ ID NO: 4802 - DNA, 25 bp, synthetic construct
  misc_feature 1..25: note = Description of Artificial Sequence: Syntheticoligonucleotide
  misc_feature 1..25: note = Description of Combined DNA/RNA Molecule: Syntheticoligonucleotide
  source 1..25: mol_type = other DNA
  modified_base order(5,9,14,19): mod_base = OTHER; note = Uracil
aaaataaatgaagtgagatggcatg

SEQ ID NO: 4803 - DNA, 25 bp, synthetic construct
  misc_feature 1..25: note = Description of Artificial Sequence: Syntheticoligonucleotide
  misc_feature 1..25: note = Description of Combined DNA/RNA Molecule: Syntheticoligonucleotide
  source 1..25: mol_type = other DNA
  modified_base order(5,14,16,18,22,23): mod_base = OTHER; note = Uracil
aagctcagcacaatctgtaaatttt

SEQ ID NO: 4804 - DNA, 25 bp, synthetic construct
  misc_feature 1..25: note = Description of Artificial Sequence: Syntheticoligonucleotide
  misc_feature 1..25: note = Description of Combined DNA/RNA Molecule: Syntheticoligonucleotide
  source 1..25: mol_type = other DNA
  modified_base order(4,13,15,17,21,22,23): mod_base = OTHER; note = Uracil
agctcagcacaatctgtaaattttt

SEQ ID NO: 4805 - DNA, 25 bp, synthetic construct
  misc_feature 1..25: note = Description of Artificial Sequence: Syntheticoligonucleotide
  misc_feature 1..25: note = Description of Combined DNA/RNA Molecule: Syntheticoligonucleotide
  source 1..25: mol_type = other DNA
  modified_base order(2,6,8,11,12,14,15,16,17): mod_base = OTHER; note = Uracil
ataactgtgattcttttaggacaat

SEQ ID NO: 4806 - DNA, 25 bp, synthetic construct
  misc_feature 1..25: note = Description of Artificial Sequence: Syntheticoligonucleotide
  misc_feature 1..25: note = Description of Combined DNA/RNA Molecule: Syntheticoligonucleotide
  source 1..25: mol_type = other DNA
  modified_base order(1,3,6,7,9,10,11,12,20,21): mod_base = OTHER; note = Uracil
tgtgattcttttaggacaattactg

SEQ ID NO: 4807 - DNA, 25 bp, synthetic construct
  misc_feature 1..25: note = Description of Artificial Sequence: Syntheticoligonucleotide
  misc_feature 1..25: note = Description of Combined DNA/RNA Molecule: Syntheticoligonucleotide
  source 1..25: mol_type = other DNA
  modified_base order(2,5,6,8,9,10,11,19,20,23): mod_base = OTHER; note = Uracil
gtgattcttttaggacaattactgt

SEQ ID NO: 4808 - RNA, 25 nt, synthetic construct
  misc_feature 1..25: note = Description of Artificial Sequence: Syntheticoligonucleotide
  source 1..25: mol_type = other RNA
tgtatgtcagatattcatattgacc

SEQ ID NO: 4809 - RNA, 25 nt, synthetic construct
  misc_feature 1..25: note = Description of Artificial Sequence: Syntheticoligonucleotide
  source 1..25: mol_type = other RNA
gtatgtcagatattcatattgaccc

SEQ ID NO: 4810 - DNA, 25 bp, synthetic construct
  misc_feature 1..25: note = Description of Artificial Sequence: Syntheticoligonucleotide
  misc_feature 1..25: note = Description of Combined DNA/RNA Molecule: Syntheticoligonucleotide
  source 1..25: mol_type = other DNA
  modified_base order(3,5,7,10,12,13,18,19,20,21,23): mod_base = OTHER; note = Uracil
aatgtgtaatattccagttttctct

SEQ ID NO: 4811 - RNA, 25 nt, synthetic construct
  misc_feature 1..25: note = Description of Artificial Sequence: Syntheticoligonucleotide
  source 1..25: mol_type = other RNA
cactgcataggaatttagaacctaa

SEQ ID NO: 4812 - DNA, 25 bp, synthetic construct
  misc_feature 1..25: note = Description of Artificial Sequence: Syntheticoligonucleotide
  misc_feature 1..25: note = Description of Combined DNA/RNA Molecule: Syntheticoligonucleotide
  source 1..25: mol_type = other DNA
  modified_base order(6,7,14,15,16,17,19,22): mod_base = OTHER; note = Uracil
caccattgcacaattttgtcctaat

SEQ ID NO: 4813 - DNA, 25 bp, synthetic construct
  misc_feature 1..25: note = Description of Artificial Sequence: Syntheticoligonucleotide
  misc_feature 1..25: note = Description of Combined DNA/RNA Molecule: Syntheticoligonucleotide
  source 1..25: mol_type = other DNA
  modified_base order(5,6,13,14,15,16,18,21): mod_base = OTHER; note = Uracil
accattgcacaattttgtcctaata

SEQ ID NO: 4814 - DNA, 25 bp, synthetic construct
  misc_feature 1..25: note = Description of Artificial Sequence: Syntheticoligonucleotide
  misc_feature 1..25: note = Description of Combined DNA/RNA Molecule: Syntheticoligonucleotide
  source 1..25: mol_type = other DNA
  modified_base order(4,5,12,13,14,15,17,20,23): mod_base = OTHER; note = Uracil
ccattgcacaattttgtcctaatat

SEQ ID NO: 4815 - DNA, 25 bp, synthetic construct
  misc_feature 1..25: note = Description of Artificial Sequence: Syntheticoligonucleotide
  misc_feature 1..25: note = Description of Combined DNA/RNA Molecule: Syntheticoligonucleotide
  source 1..25: mol_type = other DNA
  modified_base order(3,4,11,12,13,14,16,19,22): mod_base = OTHER; note = Uracil
cattgcacaattttgtcctaatata

SEQ ID NO: 4816 - DNA, 25 bp, synthetic construct
  misc_feature 1..25: note = Description of Artificial Sequence: Syntheticoligonucleotide
  misc_feature 1..25: note = Description of Combined DNA/RNA Molecule: Syntheticoligonucleotide
  source 1..25: mol_type = other DNA
  modified_base order(2,3,10,11,12,13,15,18,21,23): mod_base = OTHER; note = Uracil
attgcacaattttgtcctaatatat

SEQ ID NO: 4817 - DNA, 25 bp, synthetic construct
  misc_feature 1..25: note = Description of Artificial Sequence: Syntheticoligonucleotide
  misc_feature 1..25: note = Description of Combined DNA/RNA Molecule: Syntheticoligonucleotide
  source 1..25: mol_type = other DNA
  modified_base order(1,2,9,10,11,12,14,17,20,22): mod_base = OTHER; note = Uracil
ttgcacaattttgtcctaatatata

SEQ ID NO: 4818 - RNA, 25 nt, synthetic construct
  misc_feature 1..25: note = Description of Artificial Sequence: Syntheticoligonucleotide
  source 1..25: mol_type = other RNA
tagcatgaattctgcattgagaaac

SEQ ID NO: 4819 - DNA, 25 bp, synthetic construct
  misc_feature 1..25: note = Description of Artificial Sequence: Syntheticoligonucleotide
  misc_feature 1..25: note = Description of Combined DNA/RNA Molecule: Syntheticoligonucleotide
  source 1..25: mol_type = other DNA
  modified_base order(5,9,10,12,16,17): mod_base = OTHER; note = Uracil
agcatgaattctgcattgagaaact

SEQ ID NO: 4820 - DNA, 25 bp, synthetic construct
  misc_feature 1..25: note = Description of Artificial Sequence: Syntheticoligonucleotide
  misc_feature 1..25: note = Description of Combined DNA/RNA Molecule: Syntheticoligonucleotide
  source 1..25: mol_type = other DNA
  modified_base order(1,2,3,8,12,14,15,16,21): mod_base = OTHER; note = Uracil
tttgaagtgcctgtttgggataatg

SEQ ID NO: 4821 - RNA, 25 nt, synthetic construct
  misc_feature 1..25: note = Description of Artificial Sequence: Syntheticoligonucleotide
  source 1..25: mol_type = other RNA
ttgaagtgcctgtttgggataatga

SEQ ID NO: 4822 - DNA, 25 bp, synthetic construct
  misc_feature 1..25: note = Description of Artificial Sequence: Syntheticoligonucleotide
  misc_feature 1..25: note = Description of Combined DNA/RNA Molecule: Syntheticoligonucleotide
  source 1..25: mol_type = other DNA
  modified_base order(1,6,10,12,13,14,19,22): mod_base = OTHER; note = Uracil
tgaagtgcctgtttgggataatgat

SEQ ID NO: 4823 - DNA, 25 bp, synthetic construct
  misc_feature 1..25: note = Description of Artificial Sequence: Syntheticoligonucleotide
  misc_feature 1..25: note = Description of Combined DNA/RNA Molecule: Syntheticoligonucleotide
  source 1..25: mol_type = other DNA
  modified_base order(1,2,3,7,13,14,15,17,18,21): mod_base = OTHER; note = Uracil
tttgagtgccaatttcttactagta

SEQ ID NO: 4824 - RNA, 25 nt, synthetic construct
  misc_feature 1..25: note = Description of Artificial Sequence: Syntheticoligonucleotide
  source 1..25: mol_type = other RNA
ttgagtgccaatttcttactagtac

SEQ ID NO: 4825 - DNA, 25 bp, synthetic construct
  misc_feature 1..25: note = Description of Artificial Sequence: Syntheticoligonucleotide
  misc_feature 1..25: note = Description of Combined DNA/RNA Molecule: Syntheticoligonucleotide
  source 1..25: mol_type = other DNA
  modified_base order(1,5,11,12,13,15,16,19,22): mod_base = OTHER; note = Uracil
tgagtgccaatttcttactagtact

SEQ ID NO: 4826 - DNA, 25 bp, synthetic construct
  misc_feature 1..25: note = Description of Artificial Sequence: Syntheticoligonucleotide
  misc_feature 1..25: note = Description of Combined DNA/RNA Molecule: Syntheticoligonucleotide
  source 1..25: mol_type = other DNA
  modified_base order(4,10,11,12,14,15,18,21): mod_base = OTHER; note = Uracil
gagtgccaatttcttactagtacta

SEQ ID NO: 4827 - DNA, 25 bp, synthetic construct
  misc_feature 1..25: note = Description of Artificial Sequence: Syntheticoligonucleotide
  misc_feature 1..25: note = Description of Combined DNA/RNA Molecule: Syntheticoligonucleotide
  source 1..25: mol_type = other DNA
  modified_base order(3,9,10,11,13,14,17,20,23): mod_base = OTHER; note = Uracil
agtgccaatttcttactagtactat

SEQ ID NO: 4828 - DNA, 25 bp, synthetic construct
  misc_feature 1..25: note = Description of Artificial Sequence: Syntheticoligonucleotide
  misc_feature 1..25: note = Description of Combined DNA/RNA Molecule: Syntheticoligonucleotide
  source 1..25: mol_type = other DNA
  modified_base order(2,8,9,10,12,13,16,19,22): mod_base = OTHER; note = Uracil
gtgccaatttcttactagtactatt

SEQ ID NO: 4829 - RNA, 25 nt, synthetic construct
  misc_feature 1..25: note = Description of Artificial Sequence: Syntheticoligonucleotide
  source 1..25: mol_type = other RNA
atgtattttaactatttttgtatag

SEQ ID NO: 4830 - DNA, 25 bp, synthetic construct
  misc_feature 1..25: note = Description of Artificial Sequence: Syntheticoligonucleotide
  misc_feature 1..25: note = Description of Combined DNA/RNA Molecule: Syntheticoligonucleotide
  source 1..25: mol_type = other DNA
  modified_base order(1,3,5,6,7,8,12,14,15,16,17,18,20,22): mod_base = OTHER; note = Uracil
tgtattttaactatttttgtatagt

SEQ ID NO: 4831 - RNA, 25 nt, synthetic construct
  misc_feature 1..25: note = Description of Artificial Sequence: Syntheticoligonucleotide
  source 1..25: mol_type = other RNA
actatttttgtatagtgtaaactga

SEQ ID NO: 4832 - RNA, 25 nt, synthetic construct
  misc_feature 1..25: note = Description of Artificial Sequence: Syntheticoligonucleotide
  source 1..25: mol_type = other RNA
ctatttttgtatagtgtaaactgaa

SEQ ID NO: 4833 - RNA, 25 nt, synthetic construct
  misc_feature 1..25: note = Description of Artificial Sequence: Syntheticoligonucleotide
  source 1..25: mol_type = other RNA
tatttttgtatagtgtaaactgaaa

SEQ ID NO: 4834 - RNA, 25 nt, synthetic construct
  misc_feature 1..25: note = Description of Artificial Sequence: Syntheticoligonucleotide
  source 1..25: mol_type = other RNA
atttttgtatagtgtaaactgaaac

SEQ ID NO: 4835 - RNA, 25 nt, synthetic construct
  misc_feature 1..25: note = Description of Artificial Sequence: Syntheticoligonucleotide
  source 1..25: mol_type = other RNA
tttttgtatagtgtaaactgaaaca

SEQ ID NO: 4836 - DNA, 25 bp, synthetic construct
  misc_feature 1..25: note = Description of Artificial Sequence: Syntheticoligonucleotide
  misc_feature 1..25: note = Description of Combined DNA/RNA Molecule: Syntheticoligonucleotide
  source 1..25: mol_type = other DNA
  modified_base order(1,2,3,4,6,8,11,13,18): mod_base = OTHER; note = Uracil
ttttgtatagtgtaaactgaaacat

SEQ ID NO: 4837 - RNA, 25 nt, synthetic construct
  misc_feature 1..25: note = Description of Artificial Sequence: Syntheticoligonucleotide
  source 1..25: mol_type = other RNA
aacatgcacattttgtacattgtgc

SEQ ID NO: 4838 - DNA, 25 bp, synthetic construct
  misc_feature 1..25: note = Description of Artificial Sequence: Syntheticoligonucleotide
  misc_feature 1..25: note = Description of Combined DNA/RNA Molecule: Syntheticoligonucleotide
  source 1..25: mol_type = other DNA
  modified_base order(4,10,11,12,13,15,19,20,22): mod_base = OTHER; note = Uracil
acatgcacattttgtacattgtgct

SEQ ID NO: 4839 - DNA, 25 bp, synthetic construct
  misc_feature 1..25: note = Description of Artificial Sequence: Syntheticoligonucleotide
  misc_feature 1..25: note = Description of Combined DNA/RNA Molecule: Syntheticoligonucleotide
  source 1..25: mol_type = other DNA
  modified_base order(1,7,8,9,10,12,16,17,19,22,23): mod_base = OTHER; note = Uracil
tgcacattttgtacattgtgctttc

SEQ ID NO: 4840 - DNA, 25 bp, synthetic construct
  misc_feature 1..25: note = Description of Artificial Sequence: Syntheticoligonucleotide
  misc_feature 1..25: note = Description of Combined DNA/RNA Molecule: Syntheticoligonucleotide
  source 1..25: mol_type = other DNA
  modified_base order(6,7,8,9,11,15,16,18,21,22,23): mod_base = OTHER; note = Uracil
gcacattttgtacattgtgctttct

SEQ ID NO: 4841 - DNA, 25 bp, synthetic construct
  misc_feature 1..25: note = Description of Artificial Sequence: Syntheticoligonucleotide
  misc_feature 1..25: note = Description of Combined DNA/RNA Molecule: Syntheticoligonucleotide
  source 1..25: mol_type = other DNA
  modified_base order(5,6,7,8,10,14,15,17,20,21,22): mod_base = OTHER; note = Uracil
cacattttgtacattgtgctttctt

SEQ ID NO: 4842 - DNA, 25 bp, synthetic construct
  misc_feature 1..25: note = Description of Artificial Sequence: Syntheticoligonucleotide
  misc_feature 1..25: note = Description of Combined DNA/RNA Molecule: Syntheticoligonucleotide
  source 1..25: mol_type = other DNA
  modified_base order(4,5,6,7,9,13,14,16,19,20,21,23): mod_base = OTHER; note = Uracil
acattttgtacattgtgctttcttt

SEQ ID NO: 4843 - DNA, 25 bp, synthetic construct
  misc_feature 1..25: note = Description of Artificial Sequence: Syntheticoligonucleotide
  misc_feature 1..25: note = Description of Combined DNA/RNA Molecule: Syntheticoligonucleotide
  source 1..25: mol_type = other DNA
  modified_base order(3,4,5,6,8,12,13,15,18,19,20,22,23): mod_base = OTHER; note = Uracil
cattttgtacattgtgctttctttt

SEQ ID NO: 4844 - DNA, 25 bp, synthetic construct
  misc_feature 1..25: note = Description of Artificial Sequence: Syntheticoligonucleotide
  misc_feature 1..25: note = Description of Combined DNA/RNA Molecule: Syntheticoligonucleotide
  source 1..25: mol_type = other DNA
  modified_base order(2,3,4,5,7,11,12,14,17,18,19,21,22,23): mod_base = OTHER; note = Uracil
attttgtacattgtgctttcttttg

SEQ ID NO: 4845 - DNA, 25 bp, synthetic construct
  misc_feature 1..25: note = Description of Artificial Sequence: Syntheticoligonucleotide
  misc_feature 1..25: note = Description of Combined DNA/RNA Molecule: Syntheticoligonucleotide
  source 1..25: mol_type = other DNA
  modified_base order(1,2,3,4,6,10,11,13,16,17,18,20,21,22,23): mod_base = OTHER; note = Uracil
ttttgtacattgtgctttcttttgt

SEQ ID NO: 4846 - DNA, 25 bp, synthetic construct
  misc_feature 1..25: note = Description of Artificial Sequence: Syntheticoligonucleotide
  misc_feature 1..25: note = Description of Combined DNA/RNA Molecule: Syntheticoligonucleotide
  source 1..25: mol_type = other DNA
  modified_base order(1,8,10,15,17,20): mod_base = OTHER; note = Uracil
tgggacatatgcagtgtgatccagt

SEQ ID NO: 4847 - DNA, 25 bp, synthetic construct
  misc_feature 1..25: note = Description of Artificial Sequence: Syntheticoligonucleotide
  misc_feature 1..25: note = Description of Combined DNA/RNA Molecule: Syntheticoligonucleotide
  source 1..25: mol_type = other DNA
  modified_base order(7,9,14,16,19): mod_base = OTHER; note = Uracil
gggacatatgcagtgtgatccagtt

SEQ ID NO: 4848 - DNA, 25 bp, synthetic construct
  misc_feature 1..25: note = Description of Artificial Sequence: Syntheticoligonucleotide
  misc_feature 1..25: note = Description of Combined DNA/RNA Molecule: Syntheticoligonucleotide
  source 1..25: mol_type = other DNA
  modified_base order(6,8,13,15,18,23): mod_base = OTHER; note = Uracil
ggacatatgcagtgtgatccagttg

SEQ ID NO: 4849 - DNA, 25 bp, synthetic construct
  misc_feature 1..25: note = Description of Artificial Sequence: Syntheticoligonucleotide
  misc_feature 1..25: note = Description of Combined DNA/RNA Molecule: Syntheticoligonucleotide
  source 1..25: mol_type = other DNA
  modified_base order(5,7,12,14,17,22,23): mod_base = OTHER; note = Uracil
gacatatgcagtgtgatccagttgt

SEQ ID NO: 4850 - DNA, 25 bp, synthetic construct
  misc_feature 1..25: note = Description of Artificial Sequence: Syntheticoligonucleotide
  misc_feature 1..25: note = Description of Combined DNA/RNA Molecule: Syntheticoligonucleotide
  source 1..25: mol_type = other DNA
  modified_base order(4,6,11,13,16,21,22): mod_base = OTHER; note = Uracil
acatatgcagtgtgatccagttgtt

SEQ ID NO: 4851 - DNA, 25 bp, synthetic construct
  misc_feature 1..25: note = Description of Artificial Sequence: Syntheticoligonucleotide
  misc_feature 1..25: note = Description of Combined DNA/RNA Molecule: Syntheticoligonucleotide
  source 1..25: mol_type = other DNA
  modified_base order(3,5,10,12,15,20,21,23): mod_base = OTHER; note = Uracil
catatgcagtgtgatccagttgttt

SEQ ID NO: 4852 - DNA, 25 bp, synthetic construct
  misc_feature 1..25: note = Description of Artificial Sequence: Syntheticoligonucleotide
  misc_feature 1..25: note = Description of Combined DNA/RNA Molecule: Syntheticoligonucleotide
  source 1..25: mol_type = other DNA
  modified_base order(2,4,9,11,14,19,20,22,23): mod_base = OTHER; note = Uracil
atatgcagtgtgatccagttgtttt

SEQ ID NO: 4853 - DNA, 25 bp, synthetic construct
  misc_feature 1..25: note = Description of Artificial Sequence: Syntheticoligonucleotide
  misc_feature 1..25: note = Description of Combined DNA/RNA Molecule: Syntheticoligonucleotide
  source 1..25: mol_type = other DNA
  modified_base order(1,3,8,10,13,18,19,21,22,23): mod_base = OTHER; note = Uracil
tatgcagtgtgatccagttgttttc

SEQ ID NO: 4854 - RNA, 25 nt, synthetic construct
  misc_feature 1..25: note = Description of Artificial Sequence: Syntheticoligonucleotide
  source 1..25: mol_type = other RNA
atgcagtgtgatccagttgttttcc

SEQ ID NO: 4855 - RNA, 25 nt, synthetic construct
  misc_feature 1..25: note = Description of Artificial Sequence: Syntheticoligonucleotide
  source 1..25: mol_type = other RNA
agtgtgatccagttgttttccatca

SEQ ID NO: 4856 - DNA, 25 bp, synthetic construct
  misc_feature 1..25: note = Description of Artificial Sequence: Syntheticoligonucleotide
  misc_feature 1..25: note = Description of Combined DNA/RNA Molecule: Syntheticoligonucleotide
  source 1..25: mol_type = other DNA
  modified_base order(2,4,7,12,13,15,16,17,18,22): mod_base = OTHER; note = Uracil
gtgtgatccagttgttttccatcat

SEQ ID NO: 4857 - DNA, 25 bp, synthetic construct
  misc_feature 1..25: note = Description of Artificial Sequence: Syntheticoligonucleotide
  misc_feature 1..25: note = Description of Combined DNA/RNA Molecule: Syntheticoligonucleotide
  source 1..25: mol_type = other DNA
  modified_base order(1,3,6,11,12,14,15,16,17,21): mod_base = OTHER; note = Uracil
tgtgatccagttgttttccatcatt

SEQ ID NO: 4858 - DNA, 25 bp, synthetic construct
  misc_feature 1..25: note = Description of Artificial Sequence: Syntheticoligonucleotide
  misc_feature 1..25: note = Description of Combined DNA/RNA Molecule: Syntheticoligonucleotide
  source 1..25: mol_type = other DNA
  modified_base order(2,5,10,11,13,14,15,16,20,23): mod_base = OTHER; note = Uracil
gtgatccagttgttttccatcattt

SEQ ID NO: 4859 - DNA, 25 bp, synthetic construct
  misc_feature 1..25: note = Description of Artificial Sequence: Syntheticoligonucleotide
  misc_feature 1..25: note = Description of Combined DNA/RNA Molecule: Syntheticoligonucleotide
  source 1..25: mol_type = other DNA
  modified_base order(1,4,9,10,12,13,14,15,19,22,23): mod_base = OTHER; note = Uracil
tgatccagttgttttccatcatttg

SEQ ID NO: 4860 - RNA, 25 nt, synthetic construct
  misc_feature 1..25: note = Description of Artificial Sequence: Syntheticoligonucleotide
  source 1..25: mol_type = other RNA
gatccagttgttttccatcatttgg

SEQ ID NO: 4861 - DNA, 25 bp, synthetic construct
  misc_feature 1..25: note = Description of Artificial Sequence: Syntheticoligonucleotide
  misc_feature 1..25: note = Description of Combined DNA/RNA Molecule: Syntheticoligonucleotide
  source 1..25: mol_type = other DNA
  modified_base order(1,2,3,6,7,12,17,23): mod_base = OTHER; note = Uracil
tttggttgcgctgacctaggaatgt

SEQ ID NO: 4862 - DNA, 25 bp, synthetic construct
  misc_feature 1..25: note = Description of Artificial Sequence: Syntheticoligonucleotide
  misc_feature 1..25: note = Description of Combined DNA/RNA Molecule: Syntheticoligonucleotide
  source 1..25: mol_type = other DNA
  modified_base order(1,2,5,6,11,16,22): mod_base = OTHER; note = Uracil
ttggttgcgctgacctaggaatgtt

SEQ ID NO: 4863 - DNA, 25 bp, synthetic construct
  misc_feature 1..25: note = Description of Artificial Sequence: Syntheticoligonucleotide
  misc_feature 1..25: note = Description of Combined DNA/RNA Molecule: Syntheticoligonucleotide
  source 1..25: mol_type = other DNA
  modified_base order(5,7,8,11,14,16,23): mod_base = OTHER; note = Uracil
ggaatgttggtcatatcaaacatta

SEQ ID NO: 4864 - RNA, 25 nt, synthetic construct
  misc_feature 1..25: note = Description of Artificial Sequence: Syntheticoligonucleotide
  source 1..25: mol_type = other RNA
gaatgttggtcatatcaaacattaa

SEQ ID NO: 4865 - RNA, 25 nt, synthetic construct
  misc_feature 1..25: note = Description of Artificial Sequence: Syntheticoligonucleotide
  source 1..25: mol_type = other RNA
aatgttggtcatatcaaacattaaa

SEQ ID NO: 4866 - RNA, 25 nt, synthetic construct
  misc_feature 1..25: note = Description of Artificial Sequence: Syntheticoligonucleotide
  source 1..25: mol_type = other RNA
atgttggtcatatcaaacattaaaa

SEQ ID NO: 4867 - RNA, 25 nt, synthetic construct
  misc_feature 1..25: note = Description of Artificial Sequence: Syntheticoligonucleotide
  source 1..25: mol_type = other RNA
tgttggtcatatcaaacattaaaaa

SEQ ID NO: 4868 - DNA, 25 bp, synthetic construct
  misc_feature 1..25: note = Description of Artificial Sequence: Syntheticoligonucleotide
  misc_feature 1..25: note = Description of Combined DNA/RNA Molecule: Syntheticoligonucleotide
  source 1..25: mol_type = other DNA
  modified_base order(2,3,6,9,11,18,19): mod_base = OTHER; note = Uracil
gttggtcatatcaaacattaaaaat

SEQ ID NO: 4869 - DNA, 25 bp, synthetic construct
  misc_feature 1..25: note = Description of Artificial Sequence: Syntheticoligonucleotide
  misc_feature 1..25: note = Description of Combined DNA/RNA Molecule: Syntheticoligonucleotide
  source 1..25: mol_type = other DNA
  modified_base order(1,2,5,8,10,17,18): mod_base = OTHER; note = Uracil
ttggtcatatcaaacattaaaaatg

SEQ ID NO: 4870 - RNA, 25 nt, synthetic construct
  misc_feature 1..25: note = Description of Artificial Sequence: Syntheticoligonucleotide
  source 1..25: mol_type = other RNA
tggtcatatcaaacattaaaaatga

SEQ ID NO: 4871 - RNA, 25 nt, synthetic construct
  misc_feature 1..25: note = Description of Artificial Sequence: Syntheticoligonucleotide
  source 1..25: mol_type = other RNA
ggtcatatcaaacattaaaaatgac

SEQ ID NO: 4872 - RNA, 25 nt, synthetic construct
  misc_feature 1..25: note = Description of Artificial Sequence: Syntheticoligonucleotide
  source 1..25: mol_type = other RNA
aaattaacttttaaatgtttatagg

SEQ ID NO: 4873 - RNA, 25 nt, synthetic construct
  misc_feature 1..25: note = Description of Artificial Sequence: Syntheticoligonucleotide
  source 1..25: mol_type = other RNA
aattaacttttaaatgtttatagga

SEQ ID NO: 4874 - DNA, 25 bp, synthetic construct
  misc_feature 1..25: note = Description of Artificial Sequence: Syntheticoligonucleotide
  misc_feature 1..25: note = Description of Combined DNA/RNA Molecule: Syntheticoligonucleotide
  source 1..25: mol_type = other DNA
  modified_base order(4,5,6,7,11,13,14,15,17,23): mod_base = OTHER; note = Uracil
aacttttaaatgtttataggagtat

SEQ ID NO: 4875 - DNA, 25 bp, synthetic construct
  misc_feature 1..25: note = Description of Artificial Sequence: Syntheticoligonucleotide
  misc_feature 1..25: note = Description of Combined DNA/RNA Molecule: Syntheticoligonucleotide
  source 1..25: mol_type = other DNA
  modified_base order(3,4,5,6,10,12,13,14,16,22): mod_base = OTHER; note = Uracil
acttttaaatgtttataggagtatg

SEQ ID NO: 4876 - DNA, 25 bp, synthetic construct
  misc_feature 1..25: note = Description of Artificial Sequence: Syntheticoligonucleotide
  misc_feature 1..25: note = Description of Combined DNA/RNA Molecule: Syntheticoligonucleotide
  source 1..25: mol_type = other DNA
  modified_base order(2,3,4,5,9,11,12,13,15,21,23): mod_base = OTHER; note = Uracil
cttttaaatgtttataggagtatgt

SEQ ID NO: 4877 - DNA, 25 bp, synthetic construct
  misc_feature 1..25: note = Description of Artificial Sequence: Syntheticoligonucleotide
  misc_feature 1..25: note = Description of Combined DNA/RNA Molecule: Syntheticoligonucleotide
  source 1..25: mol_type = other DNA
  modified_base order(1,2,3,4,8,10,11,12,14,20,22): mod_base = OTHER; note = Uracil
ttttaaatgtttataggagtatgtg

SEQ ID NO: 4878 - RNA, 25 nt, synthetic construct
  misc_feature 1..25: note = Description of Artificial Sequence: Syntheticoligonucleotide
  source 1..25: mol_type = other RNA
tttaaatgtttataggagtatgtgc

SEQ ID NO: 4879 - DNA, 25 bp, synthetic construct
  misc_feature 1..25: note = Description of Artificial Sequence: Syntheticoligonucleotide
  misc_feature 1..25: note = Description of Combined DNA/RNA Molecule: Syntheticoligonucleotide
  source 1..25: mol_type = other DNA
  modified_base order(1,2,6,8,9,10,12,18,20,22): mod_base = OTHER; note = Uracil
ttaaatgtttataggagtatgtgct

SEQ ID NO: 4880 - RNA, 25 nt, synthetic construct
  misc_feature 1..25: note = Description of Artificial Sequence: Syntheticoligonucleotide
  source 1..25: mol_type = other RNA
aaatttgtaatatttttgtcatgaa

SEQ ID NO: 4881 - RNA, 25 nt, synthetic construct
  misc_feature 1..25: note = Description of Artificial Sequence: Syntheticoligonucleotide
  source 1..25: mol_type = other RNA
aatttgtaatatttttgtcatgaac

SEQ ID NO: 4882 - DNA, 25 bp, synthetic construct
  misc_feature 1..25: note = Description of Artificial Sequence: Syntheticoligonucleotide
  misc_feature 1..25: note = Description of Combined DNA/RNA Molecule: Syntheticoligonucleotide
  source 1..25: mol_type = other DNA
  modified_base order(2,3,4,6,9,11,12,13,14,15,17,20): mod_base = OTHER; note = Uracil
atttgtaatatttttgtcatgaact

SEQ ID NO: 4883 - DNA, 25 bp, synthetic construct
  misc_feature 1..25: note = Description of Artificial Sequence: Syntheticoligonucleotide
  misc_feature 1..25: note = Description of Combined DNA/RNA Molecule: Syntheticoligonucleotide
  source 1..25: mol_type = other DNA
  modified_base order(1,2,3,5,8,10,11,12,13,14,16,19): mod_base = OTHER; note = Uracil
tttgtaatatttttgtcatgaactg

SEQ ID NO: 4884 - DNA, 25 bp, synthetic construct
  misc_feature 1..25: note = Description of Artificial Sequence: Syntheticoligonucleotide
  misc_feature 1..25: note = Description of Combined DNA/RNA Molecule: Syntheticoligonucleotide
  source 1..25: mol_type = other DNA
  modified_base order(1,2,4,7,9,10,11,12,13,15,18,23): mod_base = OTHER; note = Uracil
ttgtaatatttttgtcatgaactgt

SEQ ID NO: 4885 - DNA, 25 bp, synthetic construct
  misc_feature 1..25: note = Description of Artificial Sequence: Syntheticoligonucleotide
  misc_feature 1..25: note = Description of Combined DNA/RNA Molecule: Syntheticoligonucleotide
  source 1..25: mol_type = other DNA
  modified_base order(1,3,6,8,9,10,11,12,14,17,22): mod_base = OTHER; note = Uracil
tgtaatatttttgtcatgaactgta

SEQ ID NO: 4886 - RNA, 25 nt, synthetic construct
  misc_feature 1..25: note = Description of Artificial Sequence: Syntheticoligonucleotide
  source 1..25: mol_type = other RNA
gtaatatttttgtcatgaactgtac

SEQ ID NO: 4887 - DNA, 25 bp, synthetic construct
  misc_feature 1..25: note = Description of Artificial Sequence: Syntheticoligonucleotide
  misc_feature 1..25: note = Description of Combined DNA/RNA Molecule: Syntheticoligonucleotide
  source 1..25: mol_type = other DNA
  modified_base order(1,4,6,7,8,9,10,12,15,20,22): mod_base = OTHER; note = Uracil
taatatttttgtcatgaactgtact

SEQ ID NO: 4888 - RNA, 25 nt, synthetic construct
  misc_feature 1..25: note = Description of Artificial Sequence: Syntheticoligonucleotide
  source 1..25: mol_type = other RNA
attgtaatgtaataaaaatagttac

SEQ ID NO: 4889 - RNA, 25 nt, synthetic construct
  misc_feature 1..25: note = Description of Artificial Sequence: Syntheticoligonucleotide
  source 1..25: mol_type = other RNA
ttgtaatgtaataaaaatagttaca

SEQ ID NO: 4890 - RNA, 25 nt, synthetic construct
  misc_feature 1..25: note = Description of Artificial Sequence: Syntheticoligonucleotide
  source 1..25: mol_type = other RNA
tgtaatgtaataaaaatagttacag

SEQ ID NO: 4891 - DNA, 25 bp, synthetic construct
  misc_feature 1..25: note = Description of Artificial Sequence: Syntheticoligonucleotide
  misc_feature 1..25: note = Description of Combined DNA/RNA Molecule: Syntheticoligonucleotide
  source 1..25: mol_type = other DNA
  modified_base order(2,5,7,10,16,19,20): mod_base = OTHER; note = Uracil
gtaatgtaataaaaatagttacagt

SEQ ID NO: 4892 - DNA, 25 bp, synthetic construct
  misc_feature 1..25: note = Description of Artificial Sequence: Syntheticoligonucleotide
  misc_feature 1..25: note = Description of Combined DNA/RNA Molecule: Syntheticoligonucleotide
  source 1..25: mol_type = other DNA
  modified_base order(1,4,6,9,15,18,19): mod_base = OTHER; note = Uracil
taatgtaataaaaatagttacagtg

SEQ ID NO: 4893 - DNA, 27 bp, Homo sapiens
  source 1..27: mol_type = other DNA
gagaggcctgctgaaaatgactgaata

SEQ ID NO: 4894 - DNA, 27 bp, Homo sapiens
  source 1..27: mol_type = other DNA
agaggcctgctgaaaatgactgaatat

SEQ ID NO: 4895 - DNA, 27 bp, Homo sapiens
  source 1..27: mol_type = other DNA
gaggcctgctgaaaatgactgaatata

SEQ ID NO: 4896 - DNA, 27 bp, Homo sapiens
  source 1..27: mol_type = other DNA
aggcctgctgaaaatgactgaatataa

SEQ ID NO: 4897 - DNA, 27 bp, Homo sapiens
  source 1..27: mol_type = other DNA
tagttggagctggtggcgtaggcaaga

SEQ ID NO: 4898 - DNA, 27 bp, Homo sapiens
  source 1..27: mol_type = other DNA
agttggagctggtggcgtaggcaagag

SEQ ID NO: 4899 - DNA, 27 bp, Homo sapiens
  source 1..27: mol_type = other DNA
gttggagctggtggcgtaggcaagagt

SEQ ID NO: 4900 - DNA, 27 bp, Homo sapiens
  source 1..27: mol_type = other DNA
ttggagctggtggcgtaggcaagagtg

SEQ ID NO: 4901 - DNA, 27 bp, Homo sapiens
  source 1..27: mol_type = other DNA
tggagctggtggcgtaggcaagagtgc

SEQ ID NO: 4902 - DNA, 27 bp, Homo sapiens
  source 1..27: mol_type = other DNA
ggagctggtggcgtaggcaagagtgcc

SEQ ID NO: 4903 - DNA, 27 bp, Homo sapiens
  source 1..27: mol_type = other DNA
gagctggtggcgtaggcaagagtgcct

SEQ ID NO: 4904 - DNA, 27 bp, Homo sapiens
  source 1..27: mol_type = other DNA
gatacagctaattcagaatcattttgt

SEQ ID NO: 4905 - DNA, 27 bp, Homo sapiens
  source 1..27: mol_type = other DNA
agtaattgatggagaaacctgtctctt

SEQ ID NO: 4906 - DNA, 27 bp, Homo sapiens
  source 1..27: mol_type = other DNA
gtaattgatggagaaacctgtctcttg

SEQ ID NO: 4907 - DNA, 27 bp, Homo sapiens
  source 1..27: mol_type = other DNA
ttgatggagaaacctgtctcttggata

SEQ ID NO: 4908 - DNA, 27 bp, Homo sapiens
  source 1..27: mol_type = other DNA
aacctgtctcttggatattctcgacac

SEQ ID NO: 4909 - DNA, 27 bp, Homo sapiens
  source 1..27: mol_type = other DNA
cctgtctcttggatattctcgacacag

SEQ ID NO: 4910 - DNA, 27 bp, Homo sapiens
  source 1..27: mol_type = other DNA
ctgtctcttggatattctcgacacagc

SEQ ID NO: 4911 - DNA, 27 bp, Homo sapiens
  source 1..27: mol_type = other DNA
tgtctcttggatattctcgacacagca

SEQ ID NO: 4912 - DNA, 27 bp, Homo sapiens
  source 1..27: mol_type = other DNA
gtctcttggatattctcgacacagcag

SEQ ID NO: 4913 - DNA, 27 bp, Homo sapiens
  source 1..27: mol_type = other DNA
tctcttggatattctcgacacagcagg

SEQ ID NO: 4914 - DNA, 27 bp, Homo sapiens
  source 1..27: mol_type = other DNA
ctcttggatattctcgacacagcaggt

SEQ ID NO: 4915 - DNA, 27 bp, Homo sapiens
  source 1..27: mol_type = other DNA
tcttggatattctcgacacagcaggtc

SEQ ID NO: 4916 - DNA, 27 bp, Homo sapiens
  source 1..27: mol_type = other DNA
cacagcaggtcaagaggagtacagtgc

SEQ ID NO: 4917 - DNA, 27 bp, Homo sapiens
  source 1..27: mol_type = other DNA
acagcaggtcaagaggagtacagtgca

SEQ ID NO: 4918 - DNA, 27 bp, Homo sapiens
  source 1..27: mol_type = other DNA
cagcaggtcaagaggagtacagtgcaa

SEQ ID NO: 4919 - DNA, 27 bp, Homo sapiens
  source 1..27: mol_type = other DNA
agaggagtacagtgcaatgagggacca

SEQ ID NO: 4920 - DNA, 27 bp, Homo sapiens
  source 1..27: mol_type = other DNA
gaggagtacagtgcaatgagggaccag

SEQ ID NO: 4921 - DNA, 27 bp, Homo sapiens
  source 1..27: mol_type = other DNA
aggagtacagtgcaatgagggaccagt

SEQ ID NO: 4922 - DNA, 27 bp, Homo sapiens
  source 1..27: mol_type = other DNA
ggagtacagtgcaatgagggaccagta

SEQ ID NO: 4923 - DNA, 27 bp, Homo sapiens
  source 1..27: mol_type = other DNA
gagtacagtgcaatgagggaccagtac

SEQ ID NO: 4924 - DNA, 27 bp, Homo sapiens
  source 1..27: mol_type = other DNA
agtacagtgcaatgagggaccagtaca

SEQ ID NO: 4925 - DNA, 27 bp, Homo sapiens
  source 1..27: mol_type = other DNA
gtacagtgcaatgagggaccagtacat

SEQ ID NO: 4926 - DNA, 27 bp, Homo sapiens
  source 1..27: mol_type = other DNA
tacagtgcaatgagggaccagtacatg

SEQ ID NO: 4927 - DNA, 27 bp, Homo sapiens
  source 1..27: mol_type = other DNA
acagtgcaatgagggaccagtacatga

SEQ ID NO: 4928 - DNA, 27 bp, Homo sapiens
  source 1..27: mol_type = other DNA
gtgtatttgccataaataatactaaat

SEQ ID NO: 4929 - DNA, 27 bp, Homo sapiens
  source 1..27: mol_type = other DNA
tgtatttgccataaataatactaaatc

SEQ ID NO: 4930 - DNA, 27 bp, Homo sapiens
  source 1..27: mol_type = other DNA
gtatttgccataaataatactaaatca

SEQ ID NO: 4931 - DNA, 27 bp, Homo sapiens
  source 1..27: mol_type = other DNA
tatttgccataaataatactaaatcat

SEQ ID NO: 4932 - DNA, 27 bp, Homo sapiens
  source 1..27: mol_type = other DNA
atttgccataaataatactaaatcatt

SEQ ID NO: 4933 - DNA, 27 bp, Homo sapiens
  source 1..27: mol_type = other DNA
tttgccataaataatactaaatcattt

SEQ ID NO: 4934 - DNA, 27 bp, Homo sapiens
  source 1..27: mol_type = other DNA
ttgccataaataatactaaatcatttg

SEQ ID NO: 4935 - DNA, 27 bp, Homo sapiens
  source 1..27: mol_type = other DNA
taatactaaatcatttgaagatattca

SEQ ID NO: 4936 - DNA, 27 bp, Homo sapiens
  source 1..27: mol_type = other DNA
aatactaaatcatttgaagatattcac

SEQ ID NO: 4937 - DNA, 27 bp, Homo sapiens
  source 1..27: mol_type = other DNA
atactaaatcatttgaagatattcacc

SEQ ID NO: 4938 - DNA, 27 bp, Homo sapiens
  source 1..27: mol_type = other DNA
tactaaatcatttgaagatattcacca

SEQ ID NO: 4939 - DNA, 27 bp, Homo sapiens
  source 1..27: mol_type = other DNA
actaaatcatttgaagatattcaccat

SEQ ID NO: 4940 - DNA, 27 bp, Homo sapiens
  source 1..27: mol_type = other DNA
ctaaatcatttgaagatattcaccatt

SEQ ID NO: 4941 - DNA, 27 bp, Homo sapiens
  source 1..27: mol_type = other DNA
taaatcatttgaagatattcaccatta

SEQ ID NO: 4942 - DNA, 27 bp, Homo sapiens
  source 1..27: mol_type = other DNA
aaatcatttgaagatattcaccattat

SEQ ID NO: 4943 - DNA, 27 bp, Homo sapiens
  source 1..27: mol_type = other DNA
aatcatttgaagatattcaccattata

SEQ ID NO: 4944 - DNA, 27 bp, Homo sapiens
  source 1..27: mol_type = other DNA
agatattcaccattatagagaacaaat

SEQ ID NO: 4945 - DNA, 27 bp, Homo sapiens
  source 1..27: mol_type = other DNA
gatattcaccattatagagaacaaatt

SEQ ID NO: 4946 - DNA, 27 bp, Homo sapiens
  source 1..27: mol_type = other DNA
atattcaccattatagagaacaaatta

SEQ ID NO: 4947 - DNA, 27 bp, Homo sapiens
  source 1..27: mol_type = other DNA
tattcaccattatagagaacaaattaa

SEQ ID NO: 4948 - DNA, 27 bp, Homo sapiens
  source 1..27: mol_type = other DNA
attcaccattatagagaacaaattaaa

SEQ ID NO: 4949 - DNA, 27 bp, Homo sapiens
  source 1..27: mol_type = other DNA
ttcaccattatagagaacaaattaaaa

SEQ ID NO: 4950 - DNA, 27 bp, Homo sapiens
  source 1..27: mol_type = other DNA
tcaccattatagagaacaaattaaaag

SEQ ID NO: 4951 - DNA, 27 bp, Homo sapiens
  source 1..27: mol_type = other DNA
caccattatagagaacaaattaaaaga

SEQ ID NO: 4952 - DNA, 27 bp, Homo sapiens
  source 1..27: mol_type = other DNA
accattatagagaacaaattaaaagag

SEQ ID NO: 4953 - DNA, 27 bp, Homo sapiens
  source 1..27: mol_type = other DNA
acctatggtcctagtaggaaataaatg

SEQ ID NO: 4954 - DNA, 27 bp, Homo sapiens
  source 1..27: mol_type = other DNA
aatgtgatttgccttctagaacagtag

SEQ ID NO: 4955 - DNA, 27 bp, Homo sapiens
  source 1..27: mol_type = other DNA
atgtgatttgccttctagaacagtaga

SEQ ID NO: 4956 - DNA, 27 bp, Homo sapiens
  source 1..27: mol_type = other DNA
gtgatttgccttctagaacagtagaca

SEQ ID NO: 4957 - DNA, 27 bp, Homo sapiens
  source 1..27: mol_type = other DNA
aagttatggaattccttttattgaaac

SEQ ID NO: 4958 - DNA, 27 bp, Homo sapiens
  source 1..27: mol_type = other DNA
agttatggaattccttttattgaaaca

SEQ ID NO: 4959 - DNA, 27 bp, Homo sapiens
  source 1..27: mol_type = other DNA
gttatggaattccttttattgaaacat

SEQ ID NO: 4960 - DNA, 27 bp, Homo sapiens
  source 1..27: mol_type = other DNA
atgatgccttctatacattagttcgag

SEQ ID NO: 4961 - DNA, 27 bp, Homo sapiens
  source 1..27: mol_type = other DNA
tgatgccttctatacattagttcgaga

SEQ ID NO: 4962 - DNA, 27 bp, Homo sapiens
  source 1..27: mol_type = other DNA
ttcgagaaattcgaaaacataaagaaa

SEQ ID NO: 4963 - DNA, 27 bp, Homo sapiens
  source 1..27: mol_type = other DNA
tcgaaaacataaagaaaagatgagcaa

SEQ ID NO: 4964 - DNA, 27 bp, Homo sapiens
  source 1..27: mol_type = other DNA
cgaaaacataaagaaaagatgagcaaa

SEQ ID NO: 4965 - DNA, 27 bp, Homo sapiens
  source 1..27: mol_type = other DNA
gaaaacataaagaaaagatgagcaaag

SEQ ID NO: 4966 - DNA, 27 bp, Homo sapiens
  source 1..27: mol_type = other DNA
aaaacataaagaaaagatgagcaaaga

SEQ ID NO: 4967 - DNA, 27 bp, Homo sapiens
  source 1..27: mol_type = other DNA
aaacataaagaaaagatgagcaaagat

SEQ ID NO: 4968 - DNA, 27 bp, Homo sapiens
  source 1..27: mol_type = other DNA
aacataaagaaaagatgagcaaagatg

SEQ ID NO: 4969 - DNA, 27 bp, Homo sapiens
  source 1..27: mol_type = other DNA
acataaagaaaagatgagcaaagatgg

SEQ ID NO: 4970 - DNA, 27 bp, Homo sapiens
  source 1..27: mol_type = other DNA
cataaagaaaagatgagcaaagatggt

SEQ ID NO: 4971 - DNA, 27 bp, Homo sapiens
  source 1..27: mol_type = other DNA
ataaagaaaagatgagcaaagatggta

SEQ ID NO: 4972 - DNA, 27 bp, Homo sapiens
  source 1..27: mol_type = other DNA
acaagtggtaatttttgtacattacac

SEQ ID NO: 4973 - DNA, 27 bp, Homo sapiens
  source 1..27: mol_type = other DNA
caagtggtaatttttgtacattacact

SEQ ID NO: 4974 - DNA, 27 bp, Homo sapiens
  source 1..27: mol_type = other DNA
ttttgtacattacactaaattattagc

SEQ ID NO: 4975 - DNA, 27 bp, Homo sapiens
  source 1..27: mol_type = other DNA
tttgtacattacactaaattattagca

SEQ ID NO: 4976 - DNA, 27 bp, Homo sapiens
  source 1..27: mol_type = other DNA
ttgtacattacactaaattattagcat

SEQ ID NO: 4977 - DNA, 27 bp, Homo sapiens
  source 1..27: mol_type = other DNA
tgtacattacactaaattattagcatt

SEQ ID NO: 4978 - DNA, 27 bp, Homo sapiens
  source 1..27: mol_type = other DNA
gtacattacactaaattattagcattt

SEQ ID NO: 4979 - DNA, 27 bp, Homo sapiens
  source 1..27: mol_type = other DNA
tacattacactaaattattagcatttg

SEQ ID NO: 4980 - DNA, 27 bp, Homo sapiens
  source 1..27: mol_type = other DNA
acattacactaaattattagcatttgt

SEQ ID NO: 4981 - DNA, 27 bp, Homo sapiens
  source 1..27: mol_type = other DNA
cattacactaaattattagcatttgtt

SEQ ID NO: 4982 - DNA, 27 bp, Homo sapiens
  source 1..27: mol_type = other DNA
attacactaaattattagcatttgttt

SEQ ID NO: 4983 - DNA, 27 bp, Homo sapiens
  source 1..27: mol_type = other DNA
attattagcatttgttttagcattacc

SEQ ID NO: 4984 - DNA, 27 bp, Homo sapiens
  source 1..27: mol_type = other DNA
ttattagcatttgttttagcattacct

SEQ ID NO: 4985 - DNA, 27 bp, Homo sapiens
  source 1..27: mol_type = other DNA
tattagcatttgttttagcattaccta

SEQ ID NO: 4986 - DNA, 27 bp, Homo sapiens
  source 1..27: mol_type = other DNA
attagcatttgttttagcattacctaa

SEQ ID NO: 4987 - DNA, 27 bp, Homo sapiens
  source 1..27: mol_type = other DNA
ttagcatttgttttagcattacctaat

SEQ ID NO: 4988 - DNA, 27 bp, Homo sapiens
  source 1..27: mol_type = other DNA
tagcatttgttttagcattacctaatt

SEQ ID NO: 4989 - DNA, 27 bp, Homo sapiens
  source 1..27: mol_type = other DNA
agcatttgttttagcattacctaattt

SEQ ID NO: 4990 - DNA, 27 bp, Homo sapiens
  source 1..27: mol_type = other DNA
gcatttgttttagcattacctaatttt

SEQ ID NO: 4991 - DNA, 27 bp, Homo sapiens
  source 1..27: mol_type = other DNA
catttgttttagcattacctaattttt

SEQ ID NO: 4992 - DNA, 27 bp, Homo sapiens
  source 1..27: mol_type = other DNA
tgcttattttaaaatgacagtggaagt

SEQ ID NO: 4993 - DNA, 27 bp, Homo sapiens
  source 1..27: mol_type = other DNA
cttattttaaaatgacagtggaagttt

SEQ ID NO: 4994 - DNA, 27 bp, Homo sapiens
  source 1..27: mol_type = other DNA
cctctaagtgccagtattcccagagtt

SEQ ID NO: 4995 - DNA, 27 bp, Homo sapiens
  source 1..27: mol_type = other DNA
aacaaattaatgaagcttttgaatcat

SEQ ID NO: 4996 - DNA, 27 bp, Homo sapiens
  source 1..27: mol_type = other DNA
acaaattaatgaagcttttgaatcatc

SEQ ID NO: 4997 - DNA, 27 bp, Homo sapiens
  source 1..27: mol_type = other DNA
tctgtgttttatctagtcacataaatg

SEQ ID NO: 4998 - DNA, 27 bp, Homo sapiens
  source 1..27: mol_type = other DNA
ctgtgttttatctagtcacataaatgg

SEQ ID NO: 4999 - DNA, 27 bp, Homo sapiens
  source 1..27: mol_type = other DNA
tgttttatctagtcacataaatggatt

SEQ ID NO: 5000 - DNA, 27 bp, Homo sapiens
  source 1..27: mol_type = other DNA
cataaatggattaattactaatttcag

SEQ ID NO: 5001 - DNA, 27 bp, Homo sapiens
  source 1..27: mol_type = other DNA
ataaatggattaattactaatttcagt

SEQ ID NO: 5002 - DNA, 27 bp, Homo sapiens
  source 1..27: mol_type = other DNA
taattggtttttactgaaacattgagg

SEQ ID NO: 5003 - DNA, 27 bp, Homo sapiens
  source 1..27: mol_type = other DNA
gccatttccttttcacattagataaat

SEQ ID NO: 5004 - DNA, 27 bp, Homo sapiens
  source 1..27: mol_type = other DNA
tccttttcacattagataaattactat

SEQ ID NO: 5005 - DNA, 27 bp, Homo sapiens
  source 1..27: mol_type = other DNA
cacattagataaattactataaagact

SEQ ID NO: 5006 - DNA, 27 bp, Homo sapiens
  source 1..27: mol_type = other DNA
acattagataaattactataaagactc

SEQ ID NO: 5007 - DNA, 27 bp, Homo sapiens
  source 1..27: mol_type = other DNA
cattagataaattactataaagactcc

SEQ ID NO: 5008 - DNA, 27 bp, Homo sapiens
  source 1..27: mol_type = other DNA
gttaaggcagacccagtatgaaatggg

SEQ ID NO: 5009 - DNA, 27 bp, Homo sapiens
  source 1..27: mol_type = other DNA
ttaaggcagacccagtatgaaatgggg

SEQ ID NO: 5010 - DNA, 27 bp, Homo sapiens
  source 1..27: mol_type = other DNA
taaggcagacccagtatgaaatgggga

SEQ ID NO: 5011 - DNA, 27 bp, Homo sapiens
  source 1..27: mol_type = other DNA
aaggcagacccagtatgaaatggggat

SEQ ID NO: 5012 - DNA, 27 bp, Homo sapiens
  source 1..27: mol_type = other DNA
agtatgaaatggggattattatagcaa

SEQ ID NO: 5013 - DNA, 27 bp, Homo sapiens
  source 1..27: mol_type = other DNA
tggggattattatagcaaccattttgg

SEQ ID NO: 5014 - DNA, 27 bp, Homo sapiens
  source 1..27: mol_type = other DNA
tggggctatatttacatgctactaaat

SEQ ID NO: 5015 - DNA, 27 bp, Homo sapiens
  source 1..27: mol_type = other DNA
ggggctatatttacatgctactaaatt

SEQ ID NO: 5016 - DNA, 27 bp, Homo sapiens
  source 1..27: mol_type = other DNA
gggctatatttacatgctactaaattt

SEQ ID NO: 5017 - DNA, 27 bp, Homo sapiens
  source 1..27: mol_type = other DNA
ggctatatttacatgctactaaatttt

SEQ ID NO: 5018 - DNA, 27 bp, Homo sapiens
  source 1..27: mol_type = other DNA
gctatatttacatgctactaaattttt

SEQ ID NO: 5019 - DNA, 27 bp, Homo sapiens
  source 1..27: mol_type = other DNA
ctatatttacatgctactaaattttta

SEQ ID NO: 5020 - DNA, 27 bp, Homo sapiens
  source 1..27: mol_type = other DNA
tatatttacatgctactaaatttttat

SEQ ID NO: 5021 - DNA, 27 bp, Homo sapiens
  source 1..27: mol_type = other DNA
atatttacatgctactaaatttttata

SEQ ID NO: 5022 - DNA, 27 bp, Homo sapiens
  source 1..27: mol_type = other DNA
tatttacatgctactaaatttttataa

SEQ ID NO: 5023 - DNA, 27 bp, Homo sapiens
  source 1..27: mol_type = other DNA
atttacatgctactaaatttttataat

SEQ ID NO: 5024 - DNA, 27 bp, Homo sapiens
  source 1..27: mol_type = other DNA
tttacatgctactaaatttttataata

SEQ ID NO: 5025 - DNA, 27 bp, Homo sapiens
  source 1..27: mol_type = other DNA
ctctttcatagtataactttaaatctt

SEQ ID NO: 5026 - DNA, 27 bp, Homo sapiens
  source 1..27: mol_type = other DNA
tcatagtataactttaaatcttttctt

SEQ ID NO: 5027 - DNA, 27 bp, Homo sapiens
  source 1..27: mol_type = other DNA
catagtataactttaaatcttttcttc

SEQ ID NO: 5028 - DNA, 27 bp, Homo sapiens
  source 1..27: mol_type = other DNA
tttaaatcttttcttcaacttgagtct

SEQ ID NO: 5029 - DNA, 27 bp, Homo sapiens
  source 1..27: mol_type = other DNA
ttaaatcttttcttcaacttgagtctt

SEQ ID NO: 5030 - DNA, 27 bp, Homo sapiens
  source 1..27: mol_type = other DNA
aacttgagtctttgaagatagttttaa

SEQ ID NO: 5031 - DNA, 27 bp, Homo sapiens
  source 1..27: mol_type = other DNA
cttgagtctttgaagatagttttaatt

SEQ ID NO: 5032 - DNA, 27 bp, Homo sapiens
  source 1..27: mol_type = other DNA
ttgagtctttgaagatagttttaattc

SEQ ID NO: 5033 - DNA, 27 bp, Homo sapiens
  source 1..27: mol_type = other DNA
aagatagttttaattctgcttgtgaca

SEQ ID NO: 5034 - DNA, 27 bp, Homo sapiens
  source 1..27: mol_type = other DNA
agatagttttaattctgcttgtgacat

SEQ ID NO: 5035 - DNA, 27 bp, Homo sapiens
  source 1..27: mol_type = other DNA
gatagttttaattctgcttgtgacatt

SEQ ID NO: 5036 - DNA, 27 bp, Homo sapiens
  source 1..27: mol_type = other DNA
tgcttgtgacattaaaagattatttgg

SEQ ID NO: 5037 - DNA, 27 bp, Homo sapiens
  source 1..27: mol_type = other DNA
aatattaactcaaaagttgagattttg

SEQ ID NO: 5038 - DNA, 27 bp, Homo sapiens
  source 1..27: mol_type = other DNA
ggtgtgccaagacattaattttttttt

SEQ ID NO: 5039 - DNA, 27 bp, Homo sapiens
  source 1..27: mol_type = other DNA
actggttaaattaacattgcataaaca

SEQ ID NO: 5040 - DNA, 27 bp, Homo sapiens
  source 1..27: mol_type = other DNA
ctggttaaattaacattgcataaacac

SEQ ID NO: 5041 - DNA, 27 bp, Homo sapiens
  source 1..27: mol_type = other DNA
tggttaaattaacattgcataaacact

SEQ ID NO: 5042 - DNA, 27 bp, Homo sapiens
  source 1..27: mol_type = other DNA
acattgcataaacacttttcaagtctg

SEQ ID NO: 5043 - DNA, 27 bp, Homo sapiens
  source 1..27: mol_type = other DNA
tcaagtctgatccatatttaataatgc

SEQ ID NO: 5044 - DNA, 27 bp, Homo sapiens
  source 1..27: mol_type = other DNA
tttaaaataaatgaagtgagatggcat

SEQ ID NO: 5045 - DNA, 27 bp, Homo sapiens
  source 1..27: mol_type = other DNA
ttaaaataaatgaagtgagatggcatg

SEQ ID NO: 5046 - DNA, 27 bp, Homo sapiens
  source 1..27: mol_type = other DNA
tcaagctcagcacaatctgtaaatttt

SEQ ID NO: 5047 - DNA, 27 bp, Homo sapiens
  source 1..27: mol_type = other DNA
caagctcagcacaatctgtaaattttt

SEQ ID NO: 5048 - DNA, 27 bp, Homo sapiens
  source 1..27: mol_type = other DNA
gcataactgtgattcttttaggacaat

SEQ ID NO: 5049 - DNA, 27 bp, Homo sapiens
  source 1..27: mol_type = other DNA
actgtgattcttttaggacaattactg

SEQ ID NO: 5050 - DNA, 27 bp, Homo sapiens
  source 1..27: mol_type = other DNA
ctgtgattcttttaggacaattactgt

SEQ ID NO: 5051 - DNA, 27 bp, Homo sapiens
  source 1..27: mol_type = other DNA
ggtgtatgtcagatattcatattgacc

SEQ ID NO: 5052 - DNA, 27 bp, Homo sapiens
  source 1..27: mol_type = other DNA
gtgtatgtcagatattcatattgaccc

SEQ ID NO: 5053 - DNA, 27 bp, Homo sapiens
  source 1..27: mol_type = other DNA
caaatgtgtaatattccagttttctct

SEQ ID NO: 5054 - DNA, 27 bp, Homo sapiens
  source 1..27: mol_type = other DNA
cacactgcataggaatttagaacctaa

SEQ ID NO: 5055 - DNA, 27 bp, Homo sapiens
  source 1..27: mol_type = other DNA
gtcaccattgcacaattttgtcctaat

SEQ ID NO: 5056 - DNA, 27 bp, Homo sapiens
  source 1..27: mol_type = other DNA
tcaccattgcacaattttgtcctaata

SEQ ID NO: 5057 - DNA, 27 bp, Homo sapiens
  source 1..27: mol_type = other DNA
caccattgcacaattttgtcctaatat

SEQ ID NO: 5058 - DNA, 27 bp, Homo sapiens
  source 1..27: mol_type = other DNA
accattgcacaattttgtcctaatata

SEQ ID NO: 5059 - DNA, 27 bp, Homo sapiens
  source 1..27: mol_type = other DNA
ccattgcacaattttgtcctaatatat

SEQ ID NO: 5060 - DNA, 27 bp, Homo sapiens
  source 1..27: mol_type = other DNA
cattgcacaattttgtcctaatatata

SEQ ID NO: 5061 - DNA, 27 bp, Homo sapiens
  source 1..27: mol_type = other DNA
gatagcatgaattctgcattgagaaac

SEQ ID NO: 5062 - DNA, 27 bp, Homo sapiens
  source 1..27: mol_type = other DNA
atagcatgaattctgcattgagaaact

SEQ ID NO: 5063 - DNA, 27 bp, Homo sapiens
  source 1..27: mol_type = other DNA
agtttgaagtgcctgtttgggataatg

SEQ ID NO: 5064 - DNA, 27 bp, Homo sapiens
  source 1..27: mol_type = other DNA
gtttgaagtgcctgtttgggataatga

SEQ ID NO: 5065 - DNA, 27 bp, Homo sapiens
  source 1..27: mol_type = other DNA
tttgaagtgcctgtttgggataatgat

SEQ ID NO: 5066 - DNA, 27 bp, Homo sapiens
  source 1..27: mol_type = other DNA
cctttgagtgccaatttcttactagta

SEQ ID NO: 5067 - DNA, 27 bp, Homo sapiens
  source 1..27: mol_type = other DNA
ctttgagtgccaatttcttactagtac

SEQ ID NO: 5068 - DNA, 27 bp, Homo sapiens
  source 1..27: mol_type = other DNA
tttgagtgccaatttcttactagtact

SEQ ID NO: 5069 - DNA, 27 bp, Homo sapiens
  source 1..27: mol_type = other DNA
ttgagtgccaatttcttactagtacta

SEQ ID NO: 5070 - DNA, 27 bp, Homo sapiens
  source 1..27: mol_type = other DNA
tgagtgccaatttcttactagtactat

SEQ ID NO: 5071 - DNA, 27 bp, Homo sapiens
  source 1..27: mol_type = other DNA
gagtgccaatttcttactagtactatt

SEQ ID NO: 5072 - DNA, 27 bp, Homo sapiens
  source 1..27: mol_type = other DNA
gaatgtattttaactatttttgtatag

SEQ ID NO: 5073 - DNA, 27 bp, Homo sapiens
  source 1..27: mol_type = other DNA
aatgtattttaactatttttgtatagt

SEQ ID NO: 5074 - DNA, 27 bp, Homo sapiens
  source 1..27: mol_type = other DNA
taactatttttgtatagtgtaaactga

SEQ ID NO: 5075 - DNA, 27 bp, Homo sapiens
  source 1..27: mol_type = other DNA
aactatttttgtatagtgtaaactgaa

SEQ ID NO: 5076 - DNA, 27 bp, Homo sapiens
  source 1..27: mol_type = other DNA
actatttttgtatagtgtaaactgaaa

SEQ ID NO: 5077 - DNA, 27 bp, Homo sapiens
  source 1..27: mol_type = other DNA
ctatttttgtatagtgtaaactgaaac

SEQ ID NO: 5078 - DNA, 27 bp, Homo sapiens
  source 1..27: mol_type = other DNA
tatttttgtatagtgtaaactgaaaca

SEQ ID NO: 5079 - DNA, 27 bp, Homo sapiens
  source 1..27: mol_type = other DNA
atttttgtatagtgtaaactgaaacat

SEQ ID NO: 5080 - DNA, 27 bp, Homo sapiens
  source 1..27: mol_type = other DNA
gaaacatgcacattttgtacattgtgc

SEQ ID NO: 5081 - DNA, 27 bp, Homo sapiens
  source 1..27: mol_type = other DNA
aaacatgcacattttgtacattgtgct

SEQ ID NO: 5082 - DNA, 27 bp, Homo sapiens
  source 1..27: mol_type = other DNA
catgcacattttgtacattgtgctttc

SEQ ID NO: 5083 - DNA, 27 bp, Homo sapiens
  source 1..27: mol_type = other DNA
atgcacattttgtacattgtgctttct

SEQ ID NO: 5084 - DNA, 27 bp, Homo sapiens
  source 1..27: mol_type = other DNA
tgcacattttgtacattgtgctttctt

SEQ ID NO: 5085 - DNA, 27 bp, Homo sapiens
  source 1..27: mol_type = other DNA
gcacattttgtacattgtgctttcttt

SEQ ID NO: 5086 - DNA, 27 bp, Homo sapiens
  source 1..27: mol_type = other DNA
cacattttgtacattgtgctttctttt

SEQ ID NO: 5087 - DNA, 27 bp, Homo sapiens
  source 1..27: mol_type = other DNA
acattttgtacattgtgctttcttttg

SEQ ID NO: 5088 - DNA, 27 bp, Homo sapiens
  source 1..27: mol_type = other DNA
cattttgtacattgtgctttcttttgt

SEQ ID NO: 5089 - DNA, 27 bp, Homo sapiens
  source 1..27: mol_type = other DNA
tgtgggacatatgcagtgtgatccagt

SEQ ID NO: 5090 - DNA, 27 bp, Homo sapiens
  source 1..27: mol_type = other DNA
gtgggacatatgcagtgtgatccagtt

SEQ ID NO: 5091 - DNA, 27 bp, Homo sapiens
  source 1..27: mol_type = other DNA
tgggacatatgcagtgtgatccagttg

SEQ ID NO: 5092 - DNA, 27 bp, Homo sapiens
  source 1..27: mol_type = other DNA
gggacatatgcagtgtgatccagttgt

SEQ ID NO: 5093 - DNA, 27 bp, Homo sapiens
  source 1..27: mol_type = other DNA
ggacatatgcagtgtgatccagttgtt

SEQ ID NO: 5094 - DNA, 27 bp, Homo sapiens
  source 1..27: mol_type = other DNA
gacatatgcagtgtgatccagttgttt

SEQ ID NO: 5095 - DNA, 27 bp, Homo sapiens
  source 1..27: mol_type = other DNA
acatatgcagtgtgatccagttgtttt

SEQ ID NO: 5096 - DNA, 27 bp, Homo sapiens
  source 1..27: mol_type = other DNA
catatgcagtgtgatccagttgttttc

SEQ ID NO: 5097 - DNA, 27 bp, Homo sapiens
  source 1..27: mol_type = other DNA
atatgcagtgtgatccagttgttttcc

SEQ ID NO: 5098 - DNA, 27 bp, Homo sapiens
  source 1..27: mol_type = other DNA
gcagtgtgatccagttgttttccatca

SEQ ID NO: 5099 - DNA, 27 bp, Homo sapiens
  source 1..27: mol_type = other DNA
cagtgtgatccagttgttttccatcat

SEQ ID NO: 5100 - DNA, 27 bp, Homo sapiens
  source 1..27: mol_type = other DNA
agtgtgatccagttgttttccatcatt

SEQ ID NO: 5101 - DNA, 27 bp, Homo sapiens
  source 1..27: mol_type = other DNA
gtgtgatccagttgttttccatcattt

SEQ ID NO: 5102 - DNA, 27 bp, Homo sapiens
  source 1..27: mol_type = other DNA
tgtgatccagttgttttccatcatttg

SEQ ID NO: 5103 - DNA, 27 bp, Homo sapiens
  source 1..27: mol_type = other DNA
gtgatccagttgttttccatcatttgg

SEQ ID NO: 5104 - DNA, 27 bp, Homo sapiens
  source 1..27: mol_type = other DNA
catttggttgcgctgacctaggaatgt

SEQ ID NO: 5105 - DNA, 27 bp, Homo sapiens
  source 1..27: mol_type = other DNA
atttggttgcgctgacctaggaatgtt

SEQ ID NO: 5106 - DNA, 27 bp, Homo sapiens
  source 1..27: mol_type = other DNA
taggaatgttggtcatatcaaacatta

SEQ ID NO: 5107 - DNA, 27 bp, Homo sapiens
  source 1..27: mol_type = other DNA
aggaatgttggtcatatcaaacattaa

SEQ ID NO: 5108 - DNA, 27 bp, Homo sapiens
  source 1..27: mol_type = other DNA
ggaatgttggtcatatcaaacattaaa

SEQ ID NO: 5109 - DNA, 27 bp, Homo sapiens
  source 1..27: mol_type = other DNA
gaatgttggtcatatcaaacattaaaa

SEQ ID NO: 5110 - DNA, 27 bp, Homo sapiens
  source 1..27: mol_type = other DNA
aatgttggtcatatcaaacattaaaaa

SEQ ID NO: 5111 - DNA, 27 bp, Homo sapiens
  source 1..27: mol_type = other DNA
atgttggtcatatcaaacattaaaaat

SEQ ID NO: 5112 - DNA, 27 bp, Homo sapiens
  source 1..27: mol_type = other DNA
tgttggtcatatcaaacattaaaaatg

SEQ ID NO: 5113 - DNA, 27 bp, Homo sapiens
  source 1..27: mol_type = other DNA
gttggtcatatcaaacattaaaaatga

SEQ ID NO: 5114 - DNA, 27 bp, Homo sapiens
  source 1..27: mol_type = other DNA
ttggtcatatcaaacattaaaaatgac

SEQ ID NO: 5115 - DNA, 27 bp, Homo sapiens
  source 1..27: mol_type = other DNA
tgaaattaacttttaaatgtttatagg

SEQ ID NO: 5116 - DNA, 27 bp, Homo sapiens
  source 1..27: mol_type = other DNA
gaaattaacttttaaatgtttatagga

SEQ ID NO: 5117 - DNA, 27 bp, Homo sapiens
  source 1..27: mol_type = other DNA
ttaacttttaaatgtttataggagtat

SEQ ID NO: 5118 - DNA, 27 bp, Homo sapiens
  source 1..27: mol_type = other DNA
taacttttaaatgtttataggagtatg

SEQ ID NO: 5119 - DNA, 27 bp, Homo sapiens
  source 1..27: mol_type = other DNA
aacttttaaatgtttataggagtatgt

SEQ ID NO: 5120 - DNA, 27 bp, Homo sapiens
  source 1..27: mol_type = other DNA
acttttaaatgtttataggagtatgtg

SEQ ID NO: 5121 - DNA, 27 bp, Homo sapiens
  source 1..27: mol_type = other DNA
cttttaaatgtttataggagtatgtgc

SEQ ID NO: 5122 - DNA, 27 bp, Homo sapiens
  source 1..27: mol_type = other DNA
ttttaaatgtttataggagtatgtgct

SEQ ID NO: 5123 - DNA, 27 bp, Homo sapiens
  source 1..27: mol_type = other DNA
taaaatttgtaatatttttgtcatgaa

SEQ ID NO: 5124 - DNA, 27 bp, Homo sapiens
  source 1..27: mol_type = other DNA
aaaatttgtaatatttttgtcatgaac

SEQ ID NO: 5125 - DNA, 27 bp, Homo sapiens
  source 1..27: mol_type = other DNA
aaatttgtaatatttttgtcatgaact

SEQ ID NO: 5126 - DNA, 27 bp, Homo sapiens
  source 1..27: mol_type = other DNA
aatttgtaatatttttgtcatgaactg

SEQ ID NO: 5127 - DNA, 27 bp, Homo sapiens
  source 1..27: mol_type = other DNA
atttgtaatatttttgtcatgaactgt

SEQ ID NO: 5128 - DNA, 27 bp, Homo sapiens
  source 1..27: mol_type = other DNA
tttgtaatatttttgtcatgaactgta

SEQ ID NO: 5129 - DNA, 27 bp, Homo sapiens
  source 1..27: mol_type = other DNA
ttgtaatatttttgtcatgaactgtac

SEQ ID NO: 5130 - DNA, 27 bp, Homo sapiens
  source 1..27: mol_type = other DNA
tgtaatatttttgtcatgaactgtact

SEQ ID NO: 5131 - DNA, 27 bp, Homo sapiens
  source 1..27: mol_type = other DNA
ttattgtaatgtaataaaaatagttac

SEQ ID NO: 5132 - DNA, 27 bp, Homo sapiens
  source 1..27: mol_type = other DNA
tattgtaatgtaataaaaatagttaca

SEQ ID NO: 5133 - DNA, 27 bp, Homo sapiens
  source 1..27: mol_type = other DNA
attgtaatgtaataaaaatagttacag

SEQ ID NO: 5134 - DNA, 27 bp, Homo sapiens
  source 1..27: mol_type = other DNA
ttgtaatgtaataaaaatagttacagt

SEQ ID NO: 5135 - DNA, 27 bp, Homo sapiens
  source 1..27: mol_type = other DNA
tgtaatgtaataaaaatagttacagtg

SEQ ID NO: 5136 - DNA, 25 bp, synthetic construct
  misc_feature 1..25: note = Description of Artificial Sequence: Syntheticoligonucleotide
  misc_feature 1..25: note = Description of Combined DNA/RNA Molecule: Syntheticoligonucleotide
  source 1..25: mol_type = other DNA
  modified_base order(2,4,5,6,11,15,18,21): mod_base = OTHER; note = Uracil
gtatttgccataaataatactcaat

SEQ ID NO: 5137 - DNA, 25 bp, synthetic construct
  misc_feature 1..25: note = Description of Artificial Sequence: Syntheticoligonucleotide
  misc_feature 1..25: note = Description of Combined DNA/RNA Molecule: Syntheticoligonucleotide
  source 1..25: mol_type = other DNA
  modified_base order(2,4,5,6,11,15,18,21): mod_base = OTHER; note = Uracil
gtatttgccataaataatactacat

SEQ ID NO: 5138 - DNA, 25 bp, synthetic construct
  misc_feature 1..25: note = Description of Artificial Sequence: Syntheticoligonucleotide
  misc_feature 1..25: note = Description of Combined DNA/RNA Molecule: Syntheticoligonucleotide
  source 1..25: mol_type = other DNA
  modified_base order(2,4,5,6,11,15,18,21): mod_base = OTHER; note = Uracil
gtatttgccataaataatactaact

SEQ ID NO: 5139 - RNA, 25 nt, synthetic construct
  misc_feature 1..25: note = Description of Artificial Sequence: Syntheticoligonucleotide
  source 1..25: mol_type = other RNA
gtatttgccataaataatactaaag

SEQ ID NO: 5140 - RNA, 27 nt, synthetic construct
  misc_feature 1..27: note = Description of Artificial Sequence: Syntheticoligonucleotide
  source 1..27: mol_type = other RNA
ctttagtattatttatggcaaatacac

SEQ ID NO: 5141 - RNA, 27 nt, synthetic construct
  misc_feature 1..27: note = Description of Artificial Sequence: Syntheticoligonucleotide
  source 1..27: mol_type = other RNA
acttagtattatttatggcaaatacac

SEQ ID NO: 5142 - RNA, 27 nt, synthetic construct
  misc_feature 1..27: note = Description of Artificial Sequence: Syntheticoligonucleotide
  source 1..27: mol_type = other RNA
atgtagtattatttatggcaaatacac

SEQ ID NO: 5143 - RNA, 27 nt, synthetic construct
  misc_feature 1..27: note = Description of Artificial Sequence: Syntheticoligonucleotide
  source 1..27: mol_type = other RNA
attgagtattatttatggcaaatacac

SEQ ID NO: 5144 - RNA, 25 nt, synthetic construct
  misc_feature 1..25: note = Description of Artificial Sequence: Syntheticoligonucleotide
  source 1..25: mol_type = other RNA
gttggagctggtggcgtaggcaaga

SEQ ID NO: 5145 - RNA, 25 nt, synthetic construct
  misc_feature 1..25: note = Description of Artificial Sequence: Syntheticoligonucleotide
  source 1..25: mol_type = other RNA
gttggagctgttggcgtaggcaaga

SEQ ID NO: 5146 - RNA, 25 nt, synthetic construct
  misc_feature 1..25: note = Description of Artificial Sequence: Syntheticoligonucleotide
  source 1..25: mol_type = other RNA
tattctcgacacagcaggtcaagag

SEQ ID NO: 5147 - RNA, 25 nt, synthetic construct
  misc_feature 1..25: note = Description of Artificial Sequence: Syntheticoligonucleotide
  source 1..25: mol_type = other RNA
tattctcgacacagcaggtcatgag

SEQ ID NO: 5148 - RNA, 25 nt, synthetic construct
  misc_feature 1..25: note = Description of Artificial Sequence: Syntheticoligonucleotide
  source 1..25: mol_type = other RNA
ttctcgacacagcaggtcaagagga

SEQ ID NO: 5149 - RNA, 25 nt, synthetic construct
  misc_feature 1..25: note = Description of Artificial Sequence: Syntheticoligonucleotide
  source 1..25: mol_type = other RNA
ttctcgacacagcaggtcatgagga

SEQ ID NO: 5150 - RNA, 25 nt, synthetic construct
  misc_feature 1..25: note = Description of Artificial Sequence: Syntheticoligonucleotide
  source 1..25: mol_type = other RNA
caggtcaagaggagtacagtgcaat

SEQ ID NO: 5151 - RNA, 25 nt, synthetic construct
  misc_feature 1..25: note = Description of Artificial Sequence: Syntheticoligonucleotide
  source 1..25: mol_type = other RNA
caggtcatgaggagtacagtgcaat

SEQ ID NO: 5152 - RNA, 25 nt, synthetic construct
  misc_feature 1..25: note = Description of Artificial Sequence: Syntheticoligonucleotide
  source 1..25: mol_type = other RNA
aagaggagtacagtgcaatgaggga

SEQ ID NO: 5153 - RNA, 25 nt, synthetic construct
  misc_feature 1..25: note = Description of Artificial Sequence: Syntheticoligonucleotide
  source 1..25: mol_type = other RNA
atgaggagtacagtgcaatgaggga

SEQ ID NO: 5154 - RNA, 25 nt, synthetic construct
  misc_feature 1..25: note = Description of Artificial Sequence: Syntheticoligonucleotide
  source 1..25: mol_type = other RNA
cagtgcaatgagggaccagtacatg

SEQ ID NO: 5155 - RNA, 25 nt, synthetic construct
  misc_feature 1..25: note = Description of Artificial Sequence: Syntheticoligonucleotide
  source 1..25: mol_type = other RNA
tggggagggctttctttgtgtattt

SEQ ID NO: 5156 - RNA, 25 nt, synthetic construct
  misc_feature 1..25: note = Description of Artificial Sequence: Syntheticoligonucleotide
  source 1..25: mol_type = other RNA
ggagggctttctttgtgtatttgcc

SEQ ID NO: 5157 - RNA, 25 nt, synthetic construct
  misc_feature 1..25: note = Description of Artificial Sequence: Syntheticoligonucleotide
  source 1..25: mol_type = other RNA
agggctttctttgtgtatttgccat

SEQ ID NO: 5158 - RNA, 25 nt, synthetic construct
  misc_feature 1..25: note = Description of Artificial Sequence: Syntheticoligonucleotide
  source 1..25: mol_type = other RNA
ctttctttgtgtatttgccataaat

SEQ ID NO: 5159 - RNA, 25 nt, synthetic construct
  misc_feature 1..25: note = Description of Artificial Sequence: Syntheticoligonucleotide
  source 1..25: mol_type = other RNA
tttgtgtatttgccataaataatac

SEQ ID NO: 5160 - RNA, 25 nt, synthetic construct
  misc_feature 1..25: note = Description of Artificial Sequence: Syntheticoligonucleotide
  source 1..25: mol_type = other RNA
ttgtgtatttgccataaataatact

SEQ ID NO: 5161 - RNA, 25 nt, synthetic construct
  misc_feature 1..25: note = Description of Artificial Sequence: Syntheticoligonucleotide
  source 1..25: mol_type = other RNA
tgtgtatttgccataaataatacta

SEQ ID NO: 5162 - RNA, 25 nt, synthetic construct
  misc_feature 1..25: note = Description of Artificial Sequence: Syntheticoligonucleotide
  source 1..25: mol_type = other RNA
gtgtatttgccataaataatactaa

SEQ ID NO: 5163 - RNA, 25 nt, synthetic construct
  misc_feature 1..25: note = Description of Artificial Sequence: Syntheticoligonucleotide
  source 1..25: mol_type = other RNA
tgtatttgccataaataatactaaa

SEQ ID NO: 5164 - RNA, 25 nt, synthetic construct
  misc_feature 1..25: note = Description of Artificial Sequence: Syntheticoligonucleotide
  source 1..25: mol_type = other RNA
gtatttgccataaataatactaaat

SEQ ID NO: 5165 - RNA, 25 nt, synthetic construct
  misc_feature 1..25: note = Description of Artificial Sequence: Syntheticoligonucleotide
  source 1..25: mol_type = other RNA
ataaataatactaaatcatttgaag

SEQ ID NO: 5166 - RNA, 25 nt, synthetic construct
  misc_feature 1..25: note = Description of Artificial Sequence: Syntheticoligonucleotide
  source 1..25: mol_type = other RNA
taatactaaatcatttgaagatatt

SEQ ID NO: 5167 - RNA, 25 nt, synthetic construct
  misc_feature 1..25: note = Description of Artificial Sequence: Syntheticoligonucleotide
  source 1..25: mol_type = other RNA
actaaatcatttgaagatattcacc

SEQ ID NO: 5168 - RNA, 25 nt, synthetic construct
  misc_feature 1..25: note = Description of Artificial Sequence: Syntheticoligonucleotide
  source 1..25: mol_type = other RNA
taaatcatttgaagatattcaccat

SEQ ID NO: 5169 - RNA, 25 nt, synthetic construct
  misc_feature 1..25: note = Description of Artificial Sequence: Syntheticoligonucleotide
  source 1..25: mol_type = other RNA
catttgaagatattcaccattatag

SEQ ID NO: 5170 - RNA, 25 nt, synthetic construct
  misc_feature 1..25: note = Description of Artificial Sequence: Syntheticoligonucleotide
  source 1..25: mol_type = other RNA
gaagatattcaccattatagagaac

SEQ ID NO: 5171 - RNA, 25 nt, synthetic construct
  misc_feature 1..25: note = Description of Artificial Sequence: Syntheticoligonucleotide
  source 1..25: mol_type = other RNA
agatattcaccattatagagaacaa

SEQ ID NO: 5172 - RNA, 25 nt, synthetic construct
  misc_feature 1..25: note = Description of Artificial Sequence: Syntheticoligonucleotide
  source 1..25: mol_type = other RNA
ctatggtcctagtaggaaataaatg

SEQ ID NO: 5173 - RNA, 25 nt, synthetic construct
  misc_feature 1..25: note = Description of Artificial Sequence: Syntheticoligonucleotide
  source 1..25: mol_type = other RNA
gatttgccttctagaacagtagaca

SEQ ID NO: 5174 - RNA, 25 nt, synthetic construct
  misc_feature 1..25: note = Description of Artificial Sequence: Syntheticoligonucleotide
  source 1..25: mol_type = other RNA
gatgatgccttctatacattagttc

SEQ ID NO: 5175 - RNA, 25 nt, synthetic construct
  misc_feature 1..25: note = Description of Artificial Sequence: Syntheticoligonucleotide
  source 1..25: mol_type = other RNA
cattagttcgagaaattcgaaaaca

SEQ ID NO: 5176 - RNA, 25 nt, synthetic construct
  misc_feature 1..25: note = Description of Artificial Sequence: Syntheticoligonucleotide
  source 1..25: mol_type = other RNA
agaaattcgaaaacataaagaaaag

SEQ ID NO: 5177 - RNA, 25 nt, synthetic construct
  misc_feature 1..25: note = Description of Artificial Sequence: Syntheticoligonucleotide
  source 1..25: mol_type = other RNA
aaaacataaagaaaagatgagcaaa

SEQ ID NO: 5178 - RNA, 25 nt, synthetic construct
  misc_feature 1..25: note = Description of Artificial Sequence: Syntheticoligonucleotide
  source 1..25: mol_type = other RNA
ataaagaaaagatgagcaaagatgg

SEQ ID NO: 5179 - RNA, 25 nt, synthetic construct
  misc_feature 1..25: note = Description of Artificial Sequence: Syntheticoligonucleotide
  source 1..25: mol_type = other RNA
ataaagaaaagatgagcaaagacgg

SEQ ID NO: 5180 - RNA, 25 nt, synthetic construct
  misc_feature 1..25: note = Description of Artificial Sequence: Syntheticoligonucleotide
  source 1..25: mol_type = other RNA
ttgtacattacactaaattattagc

SEQ ID NO: 5181 - RNA, 25 nt, synthetic construct
  misc_feature 1..25: note = Description of Artificial Sequence: Syntheticoligonucleotide
  source 1..25: mol_type = other RNA
aattattagcatttgttttagcatt

SEQ ID NO: 5182 - RNA, 25 nt, synthetic construct
  misc_feature 1..25: note = Description of Artificial Sequence: Syntheticoligonucleotide
  source 1..25: mol_type = other RNA
ttagcatttgttttagcattaccta

SEQ ID NO: 5183 - RNA, 25 nt, synthetic construct
  misc_feature 1..25: note = Description of Artificial Sequence: Syntheticoligonucleotide
  source 1..25: mol_type = other RNA
agtttttttttcctctaagtgccag

SEQ ID NO: 5184 - RNA, 25 nt, synthetic construct
  misc_feature 1..25: note = Description of Artificial Sequence: Syntheticoligonucleotide
  source 1..25: mol_type = other RNA
aagtgccagtattcccagagttttg

SEQ ID NO: 5185 - RNA, 25 nt, synthetic construct
  misc_feature 1..25: note = Description of Artificial Sequence: Syntheticoligonucleotide
  source 1..25: mol_type = other RNA
ggtgtgaaacaaattaatgaagctt

SEQ ID NO: 5186 - RNA, 25 nt, synthetic construct
  misc_feature 1..25: note = Description of Artificial Sequence: Syntheticoligonucleotide
  source 1..25: mol_type = other RNA
attaattactaatttcagttgagac

SEQ ID NO: 5187 - RNA, 25 nt, synthetic construct
  misc_feature 1..25: note = Description of Artificial Sequence: Syntheticoligonucleotide
  source 1..25: mol_type = other RNA
tatatttacatgctactaaattttt

SEQ ID NO: 5188 - RNA, 25 nt, synthetic construct
  misc_feature 1..25: note = Description of Artificial Sequence: Syntheticoligonucleotide
  source 1..25: mol_type = other RNA
tttaactatttttgtatagtgtaaa

SEQ ID NO: 5189 - RNA, 25 nt, synthetic construct
  misc_feature 1..25: note = Description of Artificial Sequence: Syntheticoligonucleotide
  source 1..25: mol_type = other RNA
cagtgtgatccagttgttttccatc

SEQ ID NO: 5190 - RNA, 25 nt, synthetic construct
  misc_feature 1..25: note = Description of Artificial Sequence: Syntheticoligonucleotide
  source 1..25: mol_type = other RNA
ctgaaaatgactgaatataaacttg

SEQ ID NO: 5191 - RNA, 25 nt, synthetic construct
  misc_feature 1..25: note = Description of Artificial Sequence: Syntheticoligonucleotide
  source 1..25: mol_type = other RNA
atgactgaatataaacttgtggtag

SEQ ID NO: 5192 - RNA, 25 nt, synthetic construct
  misc_feature 1..25: note = Description of Artificial Sequence: Syntheticoligonucleotide
  source 1..25: mol_type = other RNA
ctgaatataaacttgtggtagttgg

SEQ ID NO: 5193 - RNA, 25 nt, synthetic construct
  misc_feature 1..25: note = Description of Artificial Sequence: Syntheticoligonucleotide
  source 1..25: mol_type = other RNA
ctaattcagaatcattttgtggacg

SEQ ID NO: 5194 - RNA, 25 nt, synthetic construct
  misc_feature 1..25: note = Description of Artificial Sequence: Syntheticoligonucleotide
  source 1..25: mol_type = other RNA
gaatatgatccaacaatagaggatt

SEQ ID NO: 5195 - RNA, 25 nt, synthetic construct
  misc_feature 1..25: note = Description of Artificial Sequence: Syntheticoligonucleotide
  source 1..25: mol_type = other RNA
caagtagtaattgatggagaaacct

SEQ ID NO: 5196 - RNA, 25 nt, synthetic construct
  misc_feature 1..25: note = Description of Artificial Sequence: Syntheticoligonucleotide
  source 1..25: mol_type = other RNA
agggctttctttgtgtatttgccat

SEQ ID NO: 5197 - RNA, 25 nt, synthetic construct
  misc_feature 1..25: note = Description of Artificial Sequence: Syntheticoligonucleotide
  source 1..25: mol_type = other RNA
tttgtgtatttgccataaataatac

SEQ ID NO: 5198 - RNA, 25 nt, synthetic construct
  misc_feature 1..25: note = Description of Artificial Sequence: Syntheticoligonucleotide
  source 1..25: mol_type = other RNA
ttgtgtatttgccataaataatact

SEQ ID NO: 5199 - RNA, 25 nt, synthetic construct
  misc_feature 1..25: note = Description of Artificial Sequence: Syntheticoligonucleotide
  source 1..25: mol_type = other RNA
tgtgtatttgccataaataatacta

SEQ ID NO: 5200 - RNA, 25 nt, synthetic construct
  misc_feature 1..25: note = Description of Artificial Sequence: Syntheticoligonucleotide
  source 1..25: mol_type = other RNA
gtgtatttgccataaataatactaa

SEQ ID NO: 5201 - RNA, 25 nt, synthetic construct
  misc_feature 1..25: note = Description of Artificial Sequence: Syntheticoligonucleotide
  source 1..25: mol_type = other RNA
atttgccataaataatactaaatca

SEQ ID NO: 5202 - RNA, 25 nt, synthetic construct
  misc_feature 1..25: note = Description of Artificial Sequence: Syntheticoligonucleotide
  source 1..25: mol_type = other RNA
tttgccataaataatactaaatcat

SEQ ID NO: 5203 - RNA, 25 nt, synthetic construct
  misc_feature 1..25: note = Description of Artificial Sequence: Syntheticoligonucleotide
  source 1..25: mol_type = other RNA
ataaataatactaaatcatttgaag

SEQ ID NO: 5204 - RNA, 25 nt, synthetic construct
  misc_feature 1..25: note = Description of Artificial Sequence: Syntheticoligonucleotide
  source 1..25: mol_type = other RNA
taaataatactaaatcatttgaaga

SEQ ID NO: 5205 - RNA, 25 nt, synthetic construct
  misc_feature 1..25: note = Description of Artificial Sequence: Syntheticoligonucleotide
  source 1..25: mol_type = other RNA
aataatactaaatcatttgaagata

SEQ ID NO: 5206 - RNA, 25 nt, synthetic construct
  misc_feature 1..25: note = Description of Artificial Sequence: Syntheticoligonucleotide
  source 1..25: mol_type = other RNA
ataatactaaatcatttgaagatat

SEQ ID NO: 5207 - RNA, 25 nt, synthetic construct
  misc_feature 1..25: note = Description of Artificial Sequence: Syntheticoligonucleotide
  source 1..25: mol_type = other RNA
taatactaaatcatttgaagatatt

SEQ ID NO: 5208 - RNA, 25 nt, synthetic construct
  misc_feature 1..25: note = Description of Artificial Sequence: Syntheticoligonucleotide
  source 1..25: mol_type = other RNA
aatactaaatcatttgaagatattc

SEQ ID NO: 5209 - RNA, 25 nt, synthetic construct
  misc_feature 1..25: note = Description of Artificial Sequence: Syntheticoligonucleotide
  source 1..25: mol_type = other RNA
ttgaagatattcaccattatagaga

SEQ ID NO: 5210 - RNA, 25 nt, synthetic construct
  misc_feature 1..25: note = Description of Artificial Sequence: Syntheticoligonucleotide
  source 1..25: mol_type = other RNA
gaagatattcaccattatagagaac

SEQ ID NO: 5211 - RNA, 25 nt, synthetic construct
  misc_feature 1..25: note = Description of Artificial Sequence: Syntheticoligonucleotide
  source 1..25: mol_type = other RNA
aagatattcaccattatagagaaca

SEQ ID NO: 5212 - RNA, 25 nt, synthetic construct
  misc_feature 1..25: note = Description of Artificial Sequence: Syntheticoligonucleotide
  source 1..25: mol_type = other RNA
agatattcaccattatagagaacaa

SEQ ID NO: 5213 - RNA, 25 nt, synthetic construct
  misc_feature 1..25: note = Description of Artificial Sequence: Syntheticoligonucleotide
  source 1..25: mol_type = other RNA
gatattcaccattatagagaacaaa

SEQ ID NO: 5214 - RNA, 25 nt, synthetic construct
  misc_feature 1..25: note = Description of Artificial Sequence: Syntheticoligonucleotide
  source 1..25: mol_type = other RNA
attatagagaacaaattaaaagagt

SEQ ID NO: 5215 - RNA, 25 nt, synthetic construct
  misc_feature 1..25: note = Description of Artificial Sequence: Syntheticoligonucleotide
  source 1..25: mol_type = other RNA
tatagagaacaaattaaaagagtta

SEQ ID NO: 5216 - RNA, 25 nt, synthetic construct
  misc_feature 1..25: note = Description of Artificial Sequence: Syntheticoligonucleotide
  source 1..25: mol_type = other RNA
atagagaacaaattaaaagagttaa

SEQ ID NO: 5217 - RNA, 25 nt, synthetic construct
  misc_feature 1..25: note = Description of Artificial Sequence: Syntheticoligonucleotide
  source 1..25: mol_type = other RNA
tagagaacaaattaaaagagttaag

SEQ ID NO: 5218 - RNA, 25 nt, synthetic construct
  misc_feature 1..25: note = Description of Artificial Sequence: Syntheticoligonucleotide
  source 1..25: mol_type = other RNA
agagaacaaattaaaagagttaagg

SEQ ID NO: 5219 - RNA, 25 nt, synthetic construct
  misc_feature 1..25: note = Description of Artificial Sequence: Syntheticoligonucleotide
  source 1..25: mol_type = other RNA
agtaggaaataaatgtgatttgcct

SEQ ID NO: 5220 - RNA, 25 nt, synthetic construct
  misc_feature 1..25: note = Description of Artificial Sequence: Syntheticoligonucleotide
  source 1..25: mol_type = other RNA
gtaggaaataaatgtgatttgcctt

SEQ ID NO: 5221 - RNA, 25 nt, synthetic construct
  misc_feature 1..25: note = Description of Artificial Sequence: Syntheticoligonucleotide
  source 1..25: mol_type = other RNA
gaagttatggaattccttttattga

SEQ ID NO: 5222 - RNA, 25 nt, synthetic construct
  misc_feature 1..25: note = Description of Artificial Sequence: Syntheticoligonucleotide
  source 1..25: mol_type = other RNA
gttatggaattccttttattgaaac

SEQ ID NO: 5223 - RNA, 25 nt, synthetic construct
  misc_feature 1..25: note = Description of Artificial Sequence: Syntheticoligonucleotide
  source 1..25: mol_type = other RNA
ttatggaattccttttattgaaaca

SEQ ID NO: 5224 - RNA, 25 nt, synthetic construct
  misc_feature 1..25: note = Description of Artificial Sequence: Syntheticoligonucleotide
  source 1..25: mol_type = other RNA
tatggaattccttttattgaaacat

SEQ ID NO: 5225 - RNA, 25 nt, synthetic construct
  misc_feature 1..25: note = Description of Artificial Sequence: Syntheticoligonucleotide
  source 1..25: mol_type = other RNA
atggaattccttttattgaaacatc

SEQ ID NO: 5226 - RNA, 25 nt, synthetic construct
  misc_feature 1..25: note = Description of Artificial Sequence: Syntheticoligonucleotide
  source 1..25: mol_type = other RNA
gaggatgctttttatacattggtga

SEQ ID NO: 5227 - RNA, 25 nt, synthetic construct
  misc_feature 1..25: note = Description of Artificial Sequence: Syntheticoligonucleotide
  source 1..25: mol_type = other RNA
ggatgctttttatacattggtgagg

SEQ ID NO: 5228 - RNA, 25 nt, synthetic construct
  misc_feature 1..25: note = Description of Artificial Sequence: Syntheticoligonucleotide
  source 1..25: mol_type = other RNA
agattgaaaaaaatcagcaaagaag

SEQ ID NO: 5229 - RNA, 25 nt, synthetic construct
  misc_feature 1..25: note = Description of Artificial Sequence: Syntheticoligonucleotide
  source 1..25: mol_type = other RNA
gattgaaaaaaatcagcaaagaaga

SEQ ID NO: 5230 - RNA, 25 nt, synthetic construct
  misc_feature 1..25: note = Description of Artificial Sequence: Syntheticoligonucleotide
  source 1..25: mol_type = other RNA
ttgaaaaaaatcagcaaagaagaaa

SEQ ID NO: 5231 - RNA, 25 nt, synthetic construct
  misc_feature 1..25: note = Description of Artificial Sequence: Syntheticoligonucleotide
  source 1..25: mol_type = other RNA
tgaaaaaaatcagcaaagaagaaaa

SEQ ID NO: 5232 - RNA, 25 nt, synthetic construct
  misc_feature 1..25: note = Description of Artificial Sequence: Syntheticoligonucleotide
  source 1..25: mol_type = other RNA
gaaaaaaatcagcaaagaagaaaag

SEQ ID NO: 5233 - RNA, 25 nt, synthetic construct
  misc_feature 1..25: note = Description of Artificial Sequence: Syntheticoligonucleotide
  source 1..25: mol_type = other RNA
aaaaaaatcagcaaagaagaaaaga

SEQ ID NO: 5234 - RNA, 25 nt, synthetic construct
  misc_feature 1..25: note = Description of Artificial Sequence: Syntheticoligonucleotide
  source 1..25: mol_type = other RNA
ctggctgtgtgaaaattaaaaaatg

SEQ ID NO: 5235 - RNA, 25 nt, synthetic construct
  misc_feature 1..25: note = Description of Artificial Sequence: Syntheticoligonucleotide
  source 1..25: mol_type = other RNA
ctgtgtgaaaattaaaaaatgcatt

SEQ ID NO: 5236 - RNA, 25 nt, synthetic construct
  misc_feature 1..25: note = Description of Artificial Sequence: Syntheticoligonucleotide
  source 1..25: mol_type = other RNA
gtgaaaattaaaaaatgcattataa

SEQ ID NO: 5237 - RNA, 25 nt, synthetic construct
  misc_feature 1..25: note = Description of Artificial Sequence: Syntheticoligonucleotide
  source 1..25: mol_type = other RNA
tgaaaattaaaaaatgcattataat

SEQ ID NO: 5238 - RNA, 25 nt, synthetic construct
  misc_feature 1..25: note = Description of Artificial Sequence: Syntheticoligonucleotide
  source 1..25: mol_type = other RNA
gaaaattaaaaaatgcattataatg

SEQ ID NO: 5239 - RNA, 25 nt, synthetic construct
  misc_feature 1..25: note = Description of Artificial Sequence: Syntheticoligonucleotide
  source 1..25: mol_type = other RNA
aaaattaaaaaatgcattataatgt

SEQ ID NO: 5240 - RNA, 25 nt, synthetic construct
  misc_feature 1..25: note = Description of Artificial Sequence: Syntheticoligonucleotide
  source 1..25: mol_type = other RNA
aattaaaaaatgcattataatgtaa

SEQ ID NO: 5241 - RNA, 25 nt, synthetic construct
  misc_feature 1..25: note = Description of Artificial Sequence: Syntheticoligonucleotide
  source 1..25: mol_type = other RNA
attaaaaaatgcattataatgtaat

SEQ ID NO: 5242 - RNA, 25 nt, synthetic construct
  misc_feature 1..25: note = Description of Artificial Sequence: Syntheticoligonucleotide
  source 1..25: mol_type = other RNA
ttaaaaaatgcattataatgtaatc

SEQ ID NO: 5243 - RNA, 25 nt, synthetic construct
  misc_feature 1..25: note = Description of Artificial Sequence: Syntheticoligonucleotide
  source 1..25: mol_type = other RNA
taaaaaatgcattataatgtaatct

SEQ ID NO: 5244 - RNA, 25 nt, synthetic construct
  misc_feature 1..25: note = Description of Artificial Sequence: Syntheticoligonucleotide
  source 1..25: mol_type = other RNA
aaaaatgcattataatgtaatctgg

SEQ ID NO: 5245 - RNA, 25 nt, synthetic construct
  misc_feature 1..25: note = Description of Artificial Sequence: Syntheticoligonucleotide
  source 1..25: mol_type = other RNA
cattataatgtaatctgggtgttga

SEQ ID NO: 5246 - RNA, 25 nt, synthetic construct
  misc_feature 1..25: note = Description of Artificial Sequence: Syntheticoligonucleotide
  source 1..25: mol_type = other RNA
cgagaaattcgaaaacataaagaaa

SEQ ID NO: 5247 - RNA, 25 nt, synthetic construct
  misc_feature 1..25: note = Description of Artificial Sequence: Syntheticoligonucleotide
  source 1..25: mol_type = other RNA
gagaaattcgaaaacataaagaaaa

SEQ ID NO: 5248 - RNA, 25 nt, synthetic construct
  misc_feature 1..25: note = Description of Artificial Sequence: Syntheticoligonucleotide
  source 1..25: mol_type = other RNA
agaaattcgaaaacataaagaaaag

SEQ ID NO: 5249 - RNA, 25 nt, synthetic construct
  misc_feature 1..25: note = Description of Artificial Sequence: Syntheticoligonucleotide
  source 1..25: mol_type = other RNA
aattcgaaaacataaagaaaagatg

SEQ ID NO: 5250 - RNA, 25 nt, synthetic construct
  misc_feature 1..25: note = Description of Artificial Sequence: Syntheticoligonucleotide
  source 1..25: mol_type = other RNA
gaaaacataaagaaaagatgagcaa

SEQ ID NO: 5251 - RNA, 25 nt, synthetic construct
  misc_feature 1..25: note = Description of Artificial Sequence: Syntheticoligonucleotide
  source 1..25: mol_type = other RNA
aaaacataaagaaaagatgagcaaa

SEQ ID NO: 5252 - RNA, 25 nt, synthetic construct
  misc_feature 1..25: note = Description of Artificial Sequence: Syntheticoligonucleotide
  source 1..25: mol_type = other RNA
agatggtaaaaagaagaaaaagaag

SEQ ID NO: 5253 - RNA, 25 nt, synthetic construct
  misc_feature 1..25: note = Description of Artificial Sequence: Syntheticoligonucleotide
  source 1..25: mol_type = other RNA
gatggtaaaaagaagaaaaagaagt

SEQ ID NO: 5254 - RNA, 25 nt, synthetic construct
  misc_feature 1..25: note = Description of Artificial Sequence: Syntheticoligonucleotide
  source 1..25: mol_type = other RNA
tggtaaaaagaagaaaaagaagtca

SEQ ID NO: 5255 - RNA, 25 nt, synthetic construct
  misc_feature 1..25: note = Description of Artificial Sequence: Syntheticoligonucleotide
  source 1..25: mol_type = other RNA
ggtaaaaagaagaaaaagaagtcaa

SEQ ID NO: 5256 - RNA, 25 nt, synthetic construct
  misc_feature 1..25: note = Description of Artificial Sequence: Syntheticoligonucleotide
  source 1..25: mol_type = other RNA
aaagaagaaaaagaagtcaaagaca

SEQ ID NO: 5257 - RNA, 25 nt, synthetic construct
  misc_feature 1..25: note = Description of Artificial Sequence: Syntheticoligonucleotide
  source 1..25: mol_type = other RNA
aagaagaaaaagaagtcaaagacaa

SEQ ID NO: 5258 - RNA, 25 nt, synthetic construct
  misc_feature 1..25: note = Description of Artificial Sequence: Syntheticoligonucleotide
  source 1..25: mol_type = other RNA
agaagaaaaagaagtcaaagacaaa

SEQ ID NO: 5259 - RNA, 25 nt, synthetic construct
  misc_feature 1..25: note = Description of Artificial Sequence: Syntheticoligonucleotide
  source 1..25: mol_type = other RNA
aaagacaaagtgtgtaattatgtaa

SEQ ID NO: 5260 - RNA, 25 nt, synthetic construct
  misc_feature 1..25: note = Description of Artificial Sequence: Syntheticoligonucleotide
  source 1..25: mol_type = other RNA
aagacaaagtgtgtaattatgtaaa

SEQ ID NO: 5261 - RNA, 25 nt, synthetic construct
  misc_feature 1..25: note = Description of Artificial Sequence: Syntheticoligonucleotide
  source 1..25: mol_type = other RNA
caaagtgtgtaattatgtaaataca

SEQ ID NO: 5262 - RNA, 25 nt, synthetic construct
  misc_feature 1..25: note = Description of Artificial Sequence: Syntheticoligonucleotide
  source 1..25: mol_type = other RNA
aagtgtgtaattatgtaaatacaat

SEQ ID NO: 5263 - RNA, 25 nt, synthetic construct
  misc_feature 1..25: note = Description of Artificial Sequence: Syntheticoligonucleotide
  source 1..25: mol_type = other RNA
gtgtaattatgtaaatacaatttgt

SEQ ID NO: 5264 - RNA, 25 nt, synthetic construct
  misc_feature 1..25: note = Description of Artificial Sequence: Syntheticoligonucleotide
  source 1..25: mol_type = other RNA
gtaattatgtaaatacaatttgtac

SEQ ID NO: 5265 - RNA, 25 nt, synthetic construct
  misc_feature 1..25: note = Description of Artificial Sequence: Syntheticoligonucleotide
  source 1..25: mol_type = other RNA
aattatgtaaatacaatttgtactt

SEQ ID NO: 5266 - RNA, 25 nt, synthetic construct
  misc_feature 1..25: note = Description of Artificial Sequence: Syntheticoligonucleotide
  source 1..25: mol_type = other RNA
attatgtaaatacaatttgtacttt

SEQ ID NO: 5267 - RNA, 25 nt, synthetic construct
  misc_feature 1..25: note = Description of Artificial Sequence: Syntheticoligonucleotide
  source 1..25: mol_type = other RNA
tgtaaatacaatttgtacttttttc

SEQ ID NO: 5268 - RNA, 25 nt, synthetic construct
  misc_feature 1..25: note = Description of Artificial Sequence: Syntheticoligonucleotide
  source 1..25: mol_type = other RNA
gtaaatacaatttgtacttttttct

SEQ ID NO: 5269 - RNA, 25 nt, synthetic construct
  misc_feature 1..25: note = Description of Artificial Sequence: Syntheticoligonucleotide
  source 1..25: mol_type = other RNA
taaatacaatttgtacttttttctt

SEQ ID NO: 5270 - RNA, 25 nt, synthetic construct
  misc_feature 1..25: note = Description of Artificial Sequence: Syntheticoligonucleotide
  source 1..25: mol_type = other RNA
aaatacaatttgtacttttttctta

SEQ ID NO: 5271 - RNA, 25 nt, synthetic construct
  misc_feature 1..25: note = Description of Artificial Sequence: Syntheticoligonucleotide
  source 1..25: mol_type = other RNA
aatttgtacttttttcttaaggcat

SEQ ID NO: 5272 - RNA, 25 nt, synthetic construct
  misc_feature 1..25: note = Description of Artificial Sequence: Syntheticoligonucleotide
  source 1..25: mol_type = other RNA
atttgtacttttttcttaaggcata

SEQ ID NO: 5273 - RNA, 25 nt, synthetic construct
  misc_feature 1..25: note = Description of Artificial Sequence: Syntheticoligonucleotide
  source 1..25: mol_type = other RNA
ctagtacaagtggtaatttttgtac

SEQ ID NO: 5274 - RNA, 25 nt, synthetic construct
  misc_feature 1..25: note = Description of Artificial Sequence: Syntheticoligonucleotide
  source 1..25: mol_type = other RNA
tagtacaagtggtaatttttgtaca

SEQ ID NO: 5275 - RNA, 25 nt, synthetic construct
  misc_feature 1..25: note = Description of Artificial Sequence: Syntheticoligonucleotide
  source 1..25: mol_type = other RNA
aagtggtaatttttgtacattacac

SEQ ID NO: 5276 - RNA, 25 nt, synthetic construct
  misc_feature 1..25: note = Description of Artificial Sequence: Syntheticoligonucleotide
  source 1..25: mol_type = other RNA
agtggtaatttttgtacattacact

SEQ ID NO: 5277 - RNA, 25 nt, synthetic construct
  misc_feature 1..25: note = Description of Artificial Sequence: Syntheticoligonucleotide
  source 1..25: mol_type = other RNA
atttttgtacattacactaaattat

SEQ ID NO: 5278 - RNA, 25 nt, synthetic construct
  misc_feature 1..25: note = Description of Artificial Sequence: Syntheticoligonucleotide
  source 1..25: mol_type = other RNA
tttttgtacattacactaaattatt

SEQ ID NO: 5279 - RNA, 25 nt, synthetic construct
  misc_feature 1..25: note = Description of Artificial Sequence: Syntheticoligonucleotide
  source 1..25: mol_type = other RNA
ttttgtacattacactaaattatta

SEQ ID NO: 5280 - RNA, 25 nt, synthetic construct
  misc_feature 1..25: note = Description of Artificial Sequence: Syntheticoligonucleotide
  source 1..25: mol_type = other RNA
tttgtacattacactaaattattag

SEQ ID NO: 5281 - RNA, 25 nt, synthetic construct
  misc_feature 1..25: note = Description of Artificial Sequence: Syntheticoligonucleotide
  source 1..25: mol_type = other RNA
ttgtacattacactaaattattagc

SEQ ID NO: 5282 - RNA, 25 nt, synthetic construct
  misc_feature 1..25: note = Description of Artificial Sequence: Syntheticoligonucleotide
  source 1..25: mol_type = other RNA
ctaaattattagcatttgttttagc

SEQ ID NO: 5283 - RNA, 25 nt, synthetic construct
  misc_feature 1..25: note = Description of Artificial Sequence: Syntheticoligonucleotide
  source 1..25: mol_type = other RNA
aaattattagcatttgttttagcat

SEQ ID NO: 5284 - RNA, 25 nt, synthetic construct
  misc_feature 1..25: note = Description of Artificial Sequence: Syntheticoligonucleotide
  source 1..25: mol_type = other RNA
aattattagcatttgttttagcatt

SEQ ID NO: 5285 - RNA, 25 nt, synthetic construct
  misc_feature 1..25: note = Description of Artificial Sequence: Syntheticoligonucleotide
  source 1..25: mol_type = other RNA
ttagcatttgttttagcattaccta

SEQ ID NO: 5286 - RNA, 25 nt, synthetic construct
  misc_feature 1..25: note = Description of Artificial Sequence: Syntheticoligonucleotide
  source 1..25: mol_type = other RNA
tttgttttagcattacctaattttt

SEQ ID NO: 5287 - RNA, 25 nt, synthetic construct
  misc_feature 1..25: note = Description of Artificial Sequence: Syntheticoligonucleotide
  source 1..25: mol_type = other RNA
ttgttttagcattacctaatttttt

SEQ ID NO: 5288 - RNA, 25 nt, synthetic construct
  misc_feature 1..25: note = Description of Artificial Sequence: Syntheticoligonucleotide
  source 1..25: mol_type = other RNA
gttttagcattacctaatttttttc

SEQ ID NO: 5289 - RNA, 25 nt, synthetic construct
  misc_feature 1..25: note = Description of Artificial Sequence: Syntheticoligonucleotide
  source 1..25: mol_type = other RNA
ttttagcattacctaatttttttcc

SEQ ID NO: 5290 - RNA, 25 nt, synthetic construct
  misc_feature 1..25: note = Description of Artificial Sequence: Syntheticoligonucleotide
  source 1..25: mol_type = other RNA
tttagcattacctaatttttttcct

SEQ ID NO: 5291 - RNA, 25 nt, synthetic construct
  misc_feature 1..25: note = Description of Artificial Sequence: Syntheticoligonucleotide
  source 1..25: mol_type = other RNA
ttagcattacctaatttttttcctg

SEQ ID NO: 5292 - RNA, 25 nt, synthetic construct
  misc_feature 1..25: note = Description of Artificial Sequence: Syntheticoligonucleotide
  source 1..25: mol_type = other RNA
ctgttagcttttaccttaaatgctt

SEQ ID NO: 5293 - RNA, 25 nt, synthetic construct
  misc_feature 1..25: note = Description of Artificial Sequence: Syntheticoligonucleotide
  source 1..25: mol_type = other RNA
tgttagcttttaccttaaatgctta

SEQ ID NO: 5294 - RNA, 25 nt, synthetic construct
  misc_feature 1..25: note = Description of Artificial Sequence: Syntheticoligonucleotide
  source 1..25: mol_type = other RNA
cttttaccttaaatgcttattttaa

SEQ ID NO: 5295 - RNA, 25 nt, synthetic construct
  misc_feature 1..25: note = Description of Artificial Sequence: Syntheticoligonucleotide
  source 1..25: mol_type = other RNA
ttttaccttaaatgcttattttaaa

SEQ ID NO: 5296 - RNA, 25 nt, synthetic construct
  misc_feature 1..25: note = Description of Artificial Sequence: Syntheticoligonucleotide
  source 1..25: mol_type = other RNA
tttaccttaaatgcttattttaaaa

SEQ ID NO: 5297 - RNA, 25 nt, synthetic construct
  misc_feature 1..25: note = Description of Artificial Sequence: Syntheticoligonucleotide
  source 1..25: mol_type = other RNA
ttaaatgcttattttaaaatgacag

SEQ ID NO: 5298 - RNA, 25 nt, synthetic construct
  misc_feature 1..25: note = Description of Artificial Sequence: Syntheticoligonucleotide
  source 1..25: mol_type = other RNA
taaatgcttattttaaaatgacagt

SEQ ID NO: 5299 - RNA, 25 nt, synthetic construct
  misc_feature 1..25: note = Description of Artificial Sequence: Syntheticoligonucleotide
  source 1..25: mol_type = other RNA
cttattttaaaatgacagtggaagt

SEQ ID NO: 5300 - RNA, 25 nt, synthetic construct
  misc_feature 1..25: note = Description of Artificial Sequence: Syntheticoligonucleotide
  source 1..25: mol_type = other RNA
tattttaaaatgacagtggaagttt

SEQ ID NO: 5301 - RNA, 25 nt, synthetic construct
  misc_feature 1..25: note = Description of Artificial Sequence: Syntheticoligonucleotide
  source 1..25: mol_type = other RNA
ggaagtttttttttcctctaagtgc

SEQ ID NO: 5302 - RNA, 25 nt, synthetic construct
  misc_feature 1..25: note = Description of Artificial Sequence: Syntheticoligonucleotide
  source 1..25: mol_type = other RNA
aagtttttttttcctctaagtgcca

SEQ ID NO: 5303 - RNA, 25 nt, synthetic construct
  misc_feature 1..25: note = Description of Artificial Sequence: Syntheticoligonucleotide
  source 1..25: mol_type = other RNA
agtttttttttcctctaagtgccag

SEQ ID NO: 5304 - RNA, 25 nt, synthetic construct
  misc_feature 1..25: note = Description of Artificial Sequence: Syntheticoligonucleotide
  source 1..25: mol_type = other RNA
ttggtttttgaactagcaatgcctg

SEQ ID NO: 5305 - RNA, 25 nt, synthetic construct
  misc_feature 1..25: note = Description of Artificial Sequence: Syntheticoligonucleotide
  source 1..25: mol_type = other RNA
ctgtgaaaaagaaactgaataccta

SEQ ID NO: 5306 - RNA, 25 nt, synthetic construct
  misc_feature 1..25: note = Description of Artificial Sequence: Syntheticoligonucleotide
  source 1..25: mol_type = other RNA
aaagaaactgaatacctaagatttc

SEQ ID NO: 5307 - RNA, 25 nt, synthetic construct
  misc_feature 1..25: note = Description of Artificial Sequence: Syntheticoligonucleotide
  source 1..25: mol_type = other RNA
aagaaactgaatacctaagatttct

SEQ ID NO: 5308 - RNA, 25 nt, synthetic construct
  misc_feature 1..25: note = Description of Artificial Sequence: Syntheticoligonucleotide
  source 1..25: mol_type = other RNA
ctgaatacctaagatttctgtcttg

SEQ ID NO: 5309 - RNA, 25 nt, synthetic construct
  misc_feature 1..25: note = Description of Artificial Sequence: Syntheticoligonucleotide
  source 1..25: mol_type = other RNA
cagttgattacttcttatttttctt

SEQ ID NO: 5310 - RNA, 25 nt, synthetic construct
  misc_feature 1..25: note = Description of Artificial Sequence: Syntheticoligonucleotide
  source 1..25: mol_type = other RNA
agttgattacttcttatttttctta

SEQ ID NO: 5311 - RNA, 25 nt, synthetic construct
  misc_feature 1..25: note = Description of Artificial Sequence: Syntheticoligonucleotide
  source 1..25: mol_type = other RNA
gattacttcttatttttcttaccaa

SEQ ID NO: 5312 - RNA, 25 nt, synthetic construct
  misc_feature 1..25: note = Description of Artificial Sequence: Syntheticoligonucleotide
  source 1..25: mol_type = other RNA
cttatttttcttaccaattgtgaat

SEQ ID NO: 5313 - RNA, 25 nt, synthetic construct
  misc_feature 1..25: note = Description of Artificial Sequence: Syntheticoligonucleotide
  source 1..25: mol_type = other RNA
ttatttttcttaccaattgtgaatg

SEQ ID NO: 5314 - RNA, 25 nt, synthetic construct
  misc_feature 1..25: note = Description of Artificial Sequence: Syntheticoligonucleotide
  source 1..25: mol_type = other RNA
tatttttcttaccaattgtgaatgt

SEQ ID NO: 5315 - RNA, 25 nt, synthetic construct
  misc_feature 1..25: note = Description of Artificial Sequence: Syntheticoligonucleotide
  source 1..25: mol_type = other RNA
gttggtgtgaaacaaattaatgaag

SEQ ID NO: 5316 - RNA, 25 nt, synthetic construct
  misc_feature 1..25: note = Description of Artificial Sequence: Syntheticoligonucleotide
  source 1..25: mol_type = other RNA
ggtgtgaaacaaattaatgaagctt

SEQ ID NO: 5317 - RNA, 25 nt, synthetic construct
  misc_feature 1..25: note = Description of Artificial Sequence: Syntheticoligonucleotide
  source 1..25: mol_type = other RNA
gtgtgaaacaaattaatgaagcttt

SEQ ID NO: 5318 - RNA, 25 nt, synthetic construct
  misc_feature 1..25: note = Description of Artificial Sequence: Syntheticoligonucleotide
  source 1..25: mol_type = other RNA
caaattaatgaagcttttgaatcat

SEQ ID NO: 5319 - RNA, 25 nt, synthetic construct
  misc_feature 1..25: note = Description of Artificial Sequence: Syntheticoligonucleotide
  source 1..25: mol_type = other RNA
aaattaatgaagcttttgaatcatc

SEQ ID NO: 5320 - RNA, 25 nt, synthetic construct
  misc_feature 1..25: note = Description of Artificial Sequence: Syntheticoligonucleotide
  source 1..25: mol_type = other RNA
tgtgttttatctagtcacataaatg

SEQ ID NO: 5321 - RNA, 25 nt, synthetic construct
  misc_feature 1..25: note = Description of Artificial Sequence: Syntheticoligonucleotide
  source 1..25: mol_type = other RNA
gtgttttatctagtcacataaatgg

SEQ ID NO: 5322 - RNA, 25 nt, synthetic construct
  misc_feature 1..25: note = Description of Artificial Sequence: Syntheticoligonucleotide
  source 1..25: mol_type = other RNA
ttttatctagtcacataaatggatt

SEQ ID NO: 5323 - RNA, 25 nt, synthetic construct
  misc_feature 1..25: note = Description of Artificial Sequence: Syntheticoligonucleotide
  source 1..25: mol_type = other RNA
tttatctagtcacataaatggatta

SEQ ID NO: 5324 - RNA, 25 nt, synthetic construct
  misc_feature 1..25: note = Description of Artificial Sequence: Syntheticoligonucleotide
  source 1..25: mol_type = other RNA
ctagtcacataaatggattaattac

SEQ ID NO: 5325 - RNA, 25 nt, synthetic construct
  misc_feature 1..25: note = Description of Artificial Sequence: Syntheticoligonucleotide
  source 1..25: mol_type = other RNA
tagtcacataaatggattaattact

SEQ ID NO: 5326 - RNA, 25 nt, synthetic construct
  misc_feature 1..25: note = Description of Artificial Sequence: Syntheticoligonucleotide
  source 1..25: mol_type = other RNA
taaatggattaattactaatttcag

SEQ ID NO: 5327 - RNA, 25 nt, synthetic construct
  misc_feature 1..25: note = Description of Artificial Sequence: Syntheticoligonucleotide
  source 1..25: mol_type = other RNA
aaatggattaattactaatttcagt

SEQ ID NO: 5328 - RNA, 25 nt, synthetic construct
  misc_feature 1..25: note = Description of Artificial Sequence: Syntheticoligonucleotide
  source 1..25: mol_type = other RNA
gattaattactaatttcagttgaga

SEQ ID NO: 5329 - RNA, 25 nt, synthetic construct
  misc_feature 1..25: note = Description of Artificial Sequence: Syntheticoligonucleotide
  source 1..25: mol_type = other RNA
ttaattactaatttcagttgagacc

SEQ ID NO: 5330 - RNA, 25 nt, synthetic construct
  misc_feature 1..25: note = Description of Artificial Sequence: Syntheticoligonucleotide
  source 1..25: mol_type = other RNA
taattactaatttcagttgagacct

SEQ ID NO: 5331 - RNA, 25 nt, synthetic construct
  misc_feature 1..25: note = Description of Artificial Sequence: Syntheticoligonucleotide
  source 1..25: mol_type = other RNA
aattactaatttcagttgagacctt

SEQ ID NO: 5332 - RNA, 25 nt, synthetic construct
  misc_feature 1..25: note = Description of Artificial Sequence: Syntheticoligonucleotide
  source 1..25: mol_type = other RNA
attggtttttactgaaacattgagg

SEQ ID NO: 5333 - RNA, 25 nt, synthetic construct
  misc_feature 1..25: note = Description of Artificial Sequence: Syntheticoligonucleotide
  source 1..25: mol_type = other RNA
gtttttactgaaacattgagggaac

SEQ ID NO: 5334 - RNA, 25 nt, synthetic construct
  misc_feature 1..25: note = Description of Artificial Sequence: Syntheticoligonucleotide
  source 1..25: mol_type = other RNA
tttttactgaaacattgagggaaca

SEQ ID NO: 5335 - RNA, 25 nt, synthetic construct
  misc_feature 1..25: note = Description of Artificial Sequence: Syntheticoligonucleotide
  source 1..25: mol_type = other RNA
tgagggaacacaaatttatgggctt

SEQ ID NO: 5336 - RNA, 25 nt, synthetic construct
  misc_feature 1..25: note = Description of Artificial Sequence: Syntheticoligonucleotide
  source 1..25: mol_type = other RNA
gagggaacacaaatttatgggcttc

SEQ ID NO: 5337 - RNA, 25 nt, synthetic construct
  misc_feature 1..25: note = Description of Artificial Sequence: Syntheticoligonucleotide
  source 1..25: mol_type = other RNA
atgaatgtaaagttacactgttcac

SEQ ID NO: 5338 - RNA, 25 nt, synthetic construct
  misc_feature 1..25: note = Description of Artificial Sequence: Syntheticoligonucleotide
  source 1..25: mol_type = other RNA
tgaatgtaaagttacactgttcaca

SEQ ID NO: 5339 - RNA, 25 nt, synthetic construct
  misc_feature 1..25: note = Description of Artificial Sequence: Syntheticoligonucleotide
  source 1..25: mol_type = other RNA
aaaatattatattttttctataaaa

SEQ ID NO: 5340 - RNA, 25 nt, synthetic construct
  misc_feature 1..25: note = Description of Artificial Sequence: Syntheticoligonucleotide
  source 1..25: mol_type = other RNA
aaatattatattttttctataaaaa

SEQ ID NO: 5341 - RNA, 25 nt, synthetic construct
  misc_feature 1..25: note = Description of Artificial Sequence: Syntheticoligonucleotide
  source 1..25: mol_type = other RNA
aatattatattttttctataaaaag

SEQ ID NO: 5342 - RNA, 25 nt, synthetic construct
  misc_feature 1..25: note = Description of Artificial Sequence: Syntheticoligonucleotide
  source 1..25: mol_type = other RNA
atattatattttttctataaaaaga

SEQ ID NO: 5343 - RNA, 25 nt, synthetic construct
  misc_feature 1..25: note = Description of Artificial Sequence: Syntheticoligonucleotide
  source 1..25: mol_type = other RNA
attatattttttctataaaaagaaa

SEQ ID NO: 5344 - RNA, 25 nt, synthetic construct
  misc_feature 1..25: note = Description of Artificial Sequence: Syntheticoligonucleotide
  source 1..25: mol_type = other RNA
ttatattttttctataaaaagaaaa

SEQ ID NO: 5345 - RNA, 25 nt, synthetic construct
  misc_feature 1..25: note = Description of Artificial Sequence: Syntheticoligonucleotide
  source 1..25: mol_type = other RNA
tatattttttctataaaaagaaaaa

SEQ ID NO: 5346 - RNA, 25 nt, synthetic construct
  misc_feature 1..25: note = Description of Artificial Sequence: Syntheticoligonucleotide
  source 1..25: mol_type = other RNA
atattttttctataaaaagaaaaaa

SEQ ID NO: 5347 - RNA, 25 nt, synthetic construct
  misc_feature 1..25: note = Description of Artificial Sequence: Syntheticoligonucleotide
  source 1..25: mol_type = other RNA
tattttttctataaaaagaaaaaaa

SEQ ID NO: 5348 - RNA, 25 nt, synthetic construct
  misc_feature 1..25: note = Description of Artificial Sequence: Syntheticoligonucleotide
  source 1..25: mol_type = other RNA
attttttctataaaaagaaaaaaat

SEQ ID NO: 5349 - RNA, 25 nt, synthetic construct
  misc_feature 1..25: note = Description of Artificial Sequence: Syntheticoligonucleotide
  source 1..25: mol_type = other RNA
ttttttctataaaaagaaaaaaatg

SEQ ID NO: 5350 - RNA, 25 nt, synthetic construct
  misc_feature 1..25: note = Description of Artificial Sequence: Syntheticoligonucleotide
  source 1..25: mol_type = other RNA
tttttctataaaaagaaaaaaatgg

SEQ ID NO: 5351 - RNA, 25 nt, synthetic construct
  misc_feature 1..25: note = Description of Artificial Sequence: Syntheticoligonucleotide
  source 1..25: mol_type = other RNA
ctataaaaagaaaaaaatggaaaaa

SEQ ID NO: 5352 - RNA, 25 nt, synthetic construct
  misc_feature 1..25: note = Description of Artificial Sequence: Syntheticoligonucleotide
  source 1..25: mol_type = other RNA
tataaaaagaaaaaaatggaaaaaa

SEQ ID NO: 5353 - RNA, 25 nt, synthetic construct
  misc_feature 1..25: note = Description of Artificial Sequence: Syntheticoligonucleotide
  source 1..25: mol_type = other RNA
taaaaagaaaaaaatggaaaaaaat

SEQ ID NO: 5354 - RNA, 25 nt, synthetic construct
  misc_feature 1..25: note = Description of Artificial Sequence: Syntheticoligonucleotide
  source 1..25: mol_type = other RNA
aaaaagaaaaaaatggaaaaaaatt

SEQ ID NO: 5355 - RNA, 25 nt, synthetic construct
  misc_feature 1..25: note = Description of Artificial Sequence: Syntheticoligonucleotide
  source 1..25: mol_type = other RNA
aaaagaaaaaaatggaaaaaaatta

SEQ ID NO: 5356 - RNA, 25 nt, synthetic construct
  misc_feature 1..25: note = Description of Artificial Sequence: Syntheticoligonucleotide
  source 1..25: mol_type = other RNA
aaagaaaaaaatggaaaaaaattac

SEQ ID NO: 5357 - RNA, 25 nt, synthetic construct
  misc_feature 1..25: note = Description of Artificial Sequence: Syntheticoligonucleotide
  source 1..25: mol_type = other RNA
aagaaaaaaatggaaaaaaattaca

SEQ ID NO: 5358 - RNA, 25 nt, synthetic construct
  misc_feature 1..25: note = Description of Artificial Sequence: Syntheticoligonucleotide
  source 1..25: mol_type = other RNA
agaaaaaaatggaaaaaaattacaa

SEQ ID NO: 5359 - RNA, 25 nt, synthetic construct
  misc_feature 1..25: note = Description of Artificial Sequence: Syntheticoligonucleotide
  source 1..25: mol_type = other RNA
gaaaaaaatggaaaaaaattacaag

SEQ ID NO: 5360 - RNA, 25 nt, synthetic construct
  misc_feature 1..25: note = Description of Artificial Sequence: Syntheticoligonucleotide
  source 1..25: mol_type = other RNA
aaaatggaaaaaaattacaaggcaa

SEQ ID NO: 5361 - RNA, 25 nt, synthetic construct
  misc_feature 1..25: note = Description of Artificial Sequence: Syntheticoligonucleotide
  source 1..25: mol_type = other RNA
aaatggaaaaaaattacaaggcaat

SEQ ID NO: 5362 - RNA, 25 nt, synthetic construct
  misc_feature 1..25: note = Description of Artificial Sequence: Syntheticoligonucleotide
  source 1..25: mol_type = other RNA
gaaaaaaattacaaggcaatggaaa

SEQ ID NO: 5363 - RNA, 25 nt, synthetic construct
  misc_feature 1..25: note = Description of Artificial Sequence: Syntheticoligonucleotide
  source 1..25: mol_type = other RNA
aaaaaaattacaaggcaatggaaac

SEQ ID NO: 5364 - RNA, 25 nt, synthetic construct
  misc_feature 1..25: note = Description of Artificial Sequence: Syntheticoligonucleotide
  source 1..25: mol_type = other RNA
aaaaaattacaaggcaatggaaact

SEQ ID NO: 5365 - RNA, 25 nt, synthetic construct
  misc_feature 1..25: note = Description of Artificial Sequence: Syntheticoligonucleotide
  source 1..25: mol_type = other RNA
catttccttttcacattagataaat

SEQ ID NO: 5366 - RNA, 25 nt, synthetic construct
  misc_feature 1..25: note = Description of Artificial Sequence: Syntheticoligonucleotide
  source 1..25: mol_type = other RNA
cttttcacattagataaattactat

SEQ ID NO: 5367 - RNA, 25 nt, synthetic construct
  misc_feature 1..25: note = Description of Artificial Sequence: Syntheticoligonucleotide
  source 1..25: mol_type = other RNA
cattagataaattactataaagact

SEQ ID NO: 5368 - RNA, 25 nt, synthetic construct
  misc_feature 1..25: note = Description of Artificial Sequence: Syntheticoligonucleotide
  source 1..25: mol_type = other RNA
attagataaattactataaagactc

SEQ ID NO: 5369 - RNA, 25 nt, synthetic construct
  misc_feature 1..25: note = Description of Artificial Sequence: Syntheticoligonucleotide
  source 1..25: mol_type = other RNA
ttagataaattactataaagactcc

SEQ ID NO: 5370 - RNA, 25 nt, synthetic construct
  misc_feature 1..25: note = Description of Artificial Sequence: Syntheticoligonucleotide
  source 1..25: mol_type = other RNA
tatgaaatggggattattatagcaa

SEQ ID NO: 5371 - RNA, 25 nt, synthetic construct
  misc_feature 1..25: note = Description of Artificial Sequence: Syntheticoligonucleotide
  source 1..25: mol_type = other RNA
gggattattatagcaaccattttgg

SEQ ID NO: 5372 - RNA, 25 nt, synthetic construct
  misc_feature 1..25: note = Description of Artificial Sequence: Syntheticoligonucleotide
  source 1..25: mol_type = other RNA
ctatatttacatgctactaaatttt

SEQ ID NO: 5373 - RNA, 25 nt, synthetic construct
  misc_feature 1..25: note = Description of Artificial Sequence: Syntheticoligonucleotide
  source 1..25: mol_type = other RNA
tatatttacatgctactaaattttt

SEQ ID NO: 5374 - RNA, 25 nt, synthetic construct
  misc_feature 1..25: note = Description of Artificial Sequence: Syntheticoligonucleotide
  source 1..25: mol_type = other RNA
atatttacatgctactaaattttta

SEQ ID NO: 5375 - RNA, 25 nt, synthetic construct
  misc_feature 1..25: note = Description of Artificial Sequence: Syntheticoligonucleotide
  source 1..25: mol_type = other RNA
tatttacatgctactaaatttttat

SEQ ID NO: 5376 - RNA, 25 nt, synthetic construct
  misc_feature 1..25: note = Description of Artificial Sequence: Syntheticoligonucleotide
  source 1..25: mol_type = other RNA
atttacatgctactaaatttttata

SEQ ID NO: 5377 - RNA, 25 nt, synthetic construct
  misc_feature 1..25: note = Description of Artificial Sequence: Syntheticoligonucleotide
  source 1..25: mol_type = other RNA
catgctactaaatttttataataat

SEQ ID NO: 5378 - RNA, 25 nt, synthetic construct
  misc_feature 1..25: note = Description of Artificial Sequence: Syntheticoligonucleotide
  source 1..25: mol_type = other RNA
ctaaatttttataataattgaaaag

SEQ ID NO: 5379 - RNA, 25 nt, synthetic construct
  misc_feature 1..25: note = Description of Artificial Sequence: Syntheticoligonucleotide
  source 1..25: mol_type = other RNA
taaatttttataataattgaaaaga

SEQ ID NO: 5380 - RNA, 25 nt, synthetic construct
  misc_feature 1..25: note = Description of Artificial Sequence: Syntheticoligonucleotide
  source 1..25: mol_type = other RNA
aatttttataataattgaaaagatt

SEQ ID NO: 5381 - RNA, 25 nt, synthetic construct
  misc_feature 1..25: note = Description of Artificial Sequence: Syntheticoligonucleotide
  source 1..25: mol_type = other RNA
atttttataataattgaaaagattt

SEQ ID NO: 5382 - RNA, 25 nt, synthetic construct
  misc_feature 1..25: note = Description of Artificial Sequence: Syntheticoligonucleotide
  source 1..25: mol_type = other RNA
tttttataataattgaaaagatttt

SEQ ID NO: 5383 - RNA, 25 nt, synthetic construct
  misc_feature 1..25: note = Description of Artificial Sequence: Syntheticoligonucleotide
  source 1..25: mol_type = other RNA
ttttataataattgaaaagatttta

SEQ ID NO: 5384 - RNA, 25 nt, synthetic construct
  misc_feature 1..25: note = Description of Artificial Sequence: Syntheticoligonucleotide
  source 1..25: mol_type = other RNA
tttataataattgaaaagattttaa

SEQ ID NO: 5385 - RNA, 25 nt, synthetic construct
  misc_feature 1..25: note = Description of Artificial Sequence: Syntheticoligonucleotide
  source 1..25: mol_type = other RNA
ttataataattgaaaagattttaac

SEQ ID NO: 5386 - RNA, 25 nt, synthetic construct
  misc_feature 1..25: note = Description of Artificial Sequence: Syntheticoligonucleotide
  source 1..25: mol_type = other RNA
tataataattgaaaagattttaaca

SEQ ID NO: 5387 - RNA, 25 nt, synthetic construct
  misc_feature 1..25: note = Description of Artificial Sequence: Syntheticoligonucleotide
  source 1..25: mol_type = other RNA
ataataattgaaaagattttaacaa

SEQ ID NO: 5388 - RNA, 25 nt, synthetic construct
  misc_feature 1..25: note = Description of Artificial Sequence: Syntheticoligonucleotide
  source 1..25: mol_type = other RNA
taataattgaaaagattttaacaag

SEQ ID NO: 5389 - RNA, 25 nt, synthetic construct
  misc_feature 1..25: note = Description of Artificial Sequence: Syntheticoligonucleotide
  source 1..25: mol_type = other RNA
aattgaaaagattttaacaagtata

SEQ ID NO: 5390 - RNA, 25 nt, synthetic construct
  misc_feature 1..25: note = Description of Artificial Sequence: Syntheticoligonucleotide
  source 1..25: mol_type = other RNA
attgaaaagattttaacaagtataa

SEQ ID NO: 5391 - RNA, 25 nt, synthetic construct
  misc_feature 1..25: note = Description of Artificial Sequence: Syntheticoligonucleotide
  source 1..25: mol_type = other RNA
tgaaaagattttaacaagtataaaa

SEQ ID NO: 5392 - RNA, 25 nt, synthetic construct
  misc_feature 1..25: note = Description of Artificial Sequence: Syntheticoligonucleotide
  source 1..25: mol_type = other RNA
gaaaagattttaacaagtataaaaa

SEQ ID NO: 5393 - RNA, 25 nt, synthetic construct
  misc_feature 1..25: note = Description of Artificial Sequence: Syntheticoligonucleotide
  source 1..25: mol_type = other RNA
aaaagattttaacaagtataaaaaa

SEQ ID NO: 5394 - RNA, 25 nt, synthetic construct
  misc_feature 1..25: note = Description of Artificial Sequence: Syntheticoligonucleotide
  source 1..25: mol_type = other RNA
aaagattttaacaagtataaaaaat

SEQ ID NO: 5395 - RNA, 25 nt, synthetic construct
  misc_feature 1..25: note = Description of Artificial Sequence: Syntheticoligonucleotide
  source 1..25: mol_type = other RNA
aagattttaacaagtataaaaaatt

SEQ ID NO: 5396 - RNA, 25 nt, synthetic construct
  misc_feature 1..25: note = Description of Artificial Sequence: Syntheticoligonucleotide
  source 1..25: mol_type = other RNA
agattttaacaagtataaaaaattc

SEQ ID NO: 5397 - RNA, 25 nt, synthetic construct
  misc_feature 1..25: note = Description of Artificial Sequence: Syntheticoligonucleotide
  source 1..25: mol_type = other RNA
gattttaacaagtataaaaaattct

SEQ ID NO: 5398 - RNA, 25 nt, synthetic construct
  misc_feature 1..25: note = Description of Artificial Sequence: Syntheticoligonucleotide
  source 1..25: mol_type = other RNA
attttaacaagtataaaaaattctc

SEQ ID NO: 5399 - RNA, 25 nt, synthetic construct
  misc_feature 1..25: note = Description of Artificial Sequence: Syntheticoligonucleotide
  source 1..25: mol_type = other RNA
ttttaacaagtataaaaaattctca

SEQ ID NO: 5400 - RNA, 25 nt, synthetic construct
  misc_feature 1..25: note = Description of Artificial Sequence: Syntheticoligonucleotide
  source 1..25: mol_type = other RNA
aagtataaaaaattctcataggaat

SEQ ID NO: 5401 - RNA, 25 nt, synthetic construct
  misc_feature 1..25: note = Description of Artificial Sequence: Syntheticoligonucleotide
  source 1..25: mol_type = other RNA
agtataaaaaattctcataggaatt

SEQ ID NO: 5402 - RNA, 25 nt, synthetic construct
  misc_feature 1..25: note = Description of Artificial Sequence: Syntheticoligonucleotide
  source 1..25: mol_type = other RNA
gtataaaaaattctcataggaatta

SEQ ID NO: 5403 - RNA, 25 nt, synthetic construct
  misc_feature 1..25: note = Description of Artificial Sequence: Syntheticoligonucleotide
  source 1..25: mol_type = other RNA
tataaaaaattctcataggaattaa

SEQ ID NO: 5404 - RNA, 25 nt, synthetic construct
  misc_feature 1..25: note = Description of Artificial Sequence: Syntheticoligonucleotide
  source 1..25: mol_type = other RNA
ataaaaaattctcataggaattaaa

SEQ ID NO: 5405 - RNA, 25 nt, synthetic construct
  misc_feature 1..25: note = Description of Artificial Sequence: Syntheticoligonucleotide
  source 1..25: mol_type = other RNA
taaaaaattctcataggaattaaat

SEQ ID NO: 5406 - RNA, 25 nt, synthetic construct
  misc_feature 1..25: note = Description of Artificial Sequence: Syntheticoligonucleotide
  source 1..25: mol_type = other RNA
aaaaaattctcataggaattaaatg

SEQ ID NO: 5407 - RNA, 25 nt, synthetic construct
  misc_feature 1..25: note = Description of Artificial Sequence: Syntheticoligonucleotide
  source 1..25: mol_type = other RNA
aaaaattctcataggaattaaatgt

SEQ ID NO: 5408 - RNA, 25 nt, synthetic construct
  misc_feature 1..25: note = Description of Artificial Sequence: Syntheticoligonucleotide
  source 1..25: mol_type = other RNA
aaattctcataggaattaaatgtag

SEQ ID NO: 5409 - RNA, 25 nt, synthetic construct
  misc_feature 1..25: note = Description of Artificial Sequence: Syntheticoligonucleotide
  source 1..25: mol_type = other RNA
aattctcataggaattaaatgtagt

SEQ ID NO: 5410 - RNA, 25 nt, synthetic construct
  misc_feature 1..25: note = Description of Artificial Sequence: Syntheticoligonucleotide
  source 1..25: mol_type = other RNA
ctttcatagtataactttaaatctt

SEQ ID NO: 5411 - RNA, 25 nt, synthetic construct
  misc_feature 1..25: note = Description of Artificial Sequence: Syntheticoligonucleotide
  source 1..25: mol_type = other RNA
atagtataactttaaatcttttctt

SEQ ID NO: 5412 - RNA, 25 nt, synthetic construct
  misc_feature 1..25: note = Description of Artificial Sequence: Syntheticoligonucleotide
  source 1..25: mol_type = other RNA
tagtataactttaaatcttttcttc

SEQ ID NO: 5413 - RNA, 25 nt, synthetic construct
  misc_feature 1..25: note = Description of Artificial Sequence: Syntheticoligonucleotide
  source 1..25: mol_type = other RNA
taaatcttttcttcaacttgagtct

SEQ ID NO: 5414 - RNA, 25 nt, synthetic construct
  misc_feature 1..25: note = Description of Artificial Sequence: Syntheticoligonucleotide
  source 1..25: mol_type = other RNA
aaatcttttcttcaacttgagtctt

SEQ ID NO: 5415 - RNA, 25 nt, synthetic construct
  misc_feature 1..25: note = Description of Artificial Sequence: Syntheticoligonucleotide
  source 1..25: mol_type = other RNA
cttgagtctttgaagatagttttaa

SEQ ID NO: 5416 - RNA, 25 nt, synthetic construct
  misc_feature 1..25: note = Description of Artificial Sequence: Syntheticoligonucleotide
  source 1..25: mol_type = other RNA
tgagtctttgaagatagttttaatt

SEQ ID NO: 5417 - RNA, 25 nt, synthetic construct
  misc_feature 1..25: note = Description of Artificial Sequence: Syntheticoligonucleotide
  source 1..25: mol_type = other RNA
gagtctttgaagatagttttaattc

SEQ ID NO: 5418 - RNA, 25 nt, synthetic construct
  misc_feature 1..25: note = Description of Artificial Sequence: Syntheticoligonucleotide
  source 1..25: mol_type = other RNA
gatagttttaattctgcttgtgaca

SEQ ID NO: 5419 - RNA, 25 nt, synthetic construct
  misc_feature 1..25: note = Description of Artificial Sequence: Syntheticoligonucleotide
  source 1..25: mol_type = other RNA
atagttttaattctgcttgtgacat

SEQ ID NO: 5420 - RNA, 25 nt, synthetic construct
  misc_feature 1..25: note = Description of Artificial Sequence: Syntheticoligonucleotide
  source 1..25: mol_type = other RNA
tagttttaattctgcttgtgacatt

SEQ ID NO: 5421 - RNA, 25 nt, synthetic construct
  misc_feature 1..25: note = Description of Artificial Sequence: Syntheticoligonucleotide
  source 1..25: mol_type = other RNA
cttgtgacattaaaagattatttgg

SEQ ID NO: 5422 - RNA, 25 nt, synthetic construct
  misc_feature 1..25: note = Description of Artificial Sequence: Syntheticoligonucleotide
  source 1..25: mol_type = other RNA
cattgcttttgtttcttaagaaaac

SEQ ID NO: 5423 - RNA, 25 nt, synthetic construct
  misc_feature 1..25: note = Description of Artificial Sequence: Syntheticoligonucleotide
  source 1..25: mol_type = other RNA
attgcttttgtttcttaagaaaaca

SEQ ID NO: 5424 - RNA, 25 nt, synthetic construct
  misc_feature 1..25: note = Description of Artificial Sequence: Syntheticoligonucleotide
  source 1..25: mol_type = other RNA
tttgtttcttaagaaaacaaactct

SEQ ID NO: 5425 - RNA, 25 nt, synthetic construct
  misc_feature 1..25: note = Description of Artificial Sequence: Syntheticoligonucleotide
  source 1..25: mol_type = other RNA
cttaagaaaacaaactcttttttaa

SEQ ID NO: 5426 - RNA, 25 nt, synthetic construct
  misc_feature 1..25: note = Description of Artificial Sequence: Syntheticoligonucleotide
  source 1..25: mol_type = other RNA
ttaagaaaacaaactcttttttaaa

SEQ ID NO: 5427 - RNA, 25 nt, synthetic construct
  misc_feature 1..25: note = Description of Artificial Sequence: Syntheticoligonucleotide
  source 1..25: mol_type = other RNA
taagaaaacaaactcttttttaaaa

SEQ ID NO: 5428 - RNA, 25 nt, synthetic construct
  misc_feature 1..25: note = Description of Artificial Sequence: Syntheticoligonucleotide
  source 1..25: mol_type = other RNA
aagaaaacaaactcttttttaaaaa

SEQ ID NO: 5429 - RNA, 25 nt, synthetic construct
  misc_feature 1..25: note = Description of Artificial Sequence: Syntheticoligonucleotide
  source 1..25: mol_type = other RNA
agaaaacaaactcttttttaaaaat

SEQ ID NO: 5430 - RNA, 25 nt, synthetic construct
  misc_feature 1..25: note = Description of Artificial Sequence: Syntheticoligonucleotide
  source 1..25: mol_type = other RNA
gaaaacaaactcttttttaaaaatt

SEQ ID NO: 5431 - RNA, 25 nt, synthetic construct
  misc_feature 1..25: note = Description of Artificial Sequence: Syntheticoligonucleotide
  source 1..25: mol_type = other RNA
aaaacaaactcttttttaaaaatta

SEQ ID NO: 5432 - RNA, 25 nt, synthetic construct
  misc_feature 1..25: note = Description of Artificial Sequence: Syntheticoligonucleotide
  source 1..25: mol_type = other RNA
caaactcttttttaaaaattacttt

SEQ ID NO: 5433 - RNA, 25 nt, synthetic construct
  misc_feature 1..25: note = Description of Artificial Sequence: Syntheticoligonucleotide
  source 1..25: mol_type = other RNA
cttttttaaaaattacttttaaata

SEQ ID NO: 5434 - RNA, 25 nt, synthetic construct
  misc_feature 1..25: note = Description of Artificial Sequence: Syntheticoligonucleotide
  source 1..25: mol_type = other RNA
ttttttaaaaattacttttaaatat

SEQ ID NO: 5435 - RNA, 25 nt, synthetic construct
  misc_feature 1..25: note = Description of Artificial Sequence: Syntheticoligonucleotide
  source 1..25: mol_type = other RNA
tttttaaaaattacttttaaatatt

SEQ ID NO: 5436 - RNA, 25 nt, synthetic construct
  misc_feature 1..25: note = Description of Artificial Sequence: Syntheticoligonucleotide
  source 1..25: mol_type = other RNA
ttttaaaaattacttttaaatatta

SEQ ID NO: 5437 - RNA, 25 nt, synthetic construct
  misc_feature 1..25: note = Description of Artificial Sequence: Syntheticoligonucleotide
  source 1..25: mol_type = other RNA
tttaaaaattacttttaaatattaa

SEQ ID NO: 5438 - RNA, 25 nt, synthetic construct
  misc_feature 1..25: note = Description of Artificial Sequence: Syntheticoligonucleotide
  source 1..25: mol_type = other RNA
ttaaaaattacttttaaatattaac

SEQ ID NO: 5439 - RNA, 25 nt, synthetic construct
  misc_feature 1..25: note = Description of Artificial Sequence: Syntheticoligonucleotide
  source 1..25: mol_type = other RNA
taaaaattacttttaaatattaact

SEQ ID NO: 5440 - RNA, 25 nt, synthetic construct
  misc_feature 1..25: note = Description of Artificial Sequence: Syntheticoligonucleotide
  source 1..25: mol_type = other RNA
aaaaattacttttaaatattaactc

SEQ ID NO: 5441 - RNA, 25 nt, synthetic construct
  misc_feature 1..25: note = Description of Artificial Sequence: Syntheticoligonucleotide
  source 1..25: mol_type = other RNA
aaaattacttttaaatattaactca

SEQ ID NO: 5442 - RNA, 25 nt, synthetic construct
  misc_feature 1..25: note = Description of Artificial Sequence: Syntheticoligonucleotide
  source 1..25: mol_type = other RNA
cttttaaatattaactcaaaagttg

SEQ ID NO: 5443 - RNA, 25 nt, synthetic construct
  misc_feature 1..25: note = Description of Artificial Sequence: Syntheticoligonucleotide
  source 1..25: mol_type = other RNA
ttttaaatattaactcaaaagttga

SEQ ID NO: 5444 - RNA, 25 nt, synthetic construct
  misc_feature 1..25: note = Description of Artificial Sequence: Syntheticoligonucleotide
  source 1..25: mol_type = other RNA
ttaaatattaactcaaaagttgaga

SEQ ID NO: 5445 - RNA, 25 nt, synthetic construct
  misc_feature 1..25: note = Description of Artificial Sequence: Syntheticoligonucleotide
  source 1..25: mol_type = other RNA
aaatattaactcaaaagttgagatt

SEQ ID NO: 5446 - RNA, 25 nt, synthetic construct
  misc_feature 1..25: note = Description of Artificial Sequence: Syntheticoligonucleotide
  source 1..25: mol_type = other RNA
aatattaactcaaaagttgagattt

SEQ ID NO: 5447 - RNA, 25 nt, synthetic construct
  misc_feature 1..25: note = Description of Artificial Sequence: Syntheticoligonucleotide
  source 1..25: mol_type = other RNA
atattaactcaaaagttgagatttt

SEQ ID NO: 5448 - RNA, 25 nt, synthetic construct
  misc_feature 1..25: note = Description of Artificial Sequence: Syntheticoligonucleotide
  source 1..25: mol_type = other RNA
tattaactcaaaagttgagattttg

SEQ ID NO: 5449 - RNA, 25 nt, synthetic construct
  misc_feature 1..25: note = Description of Artificial Sequence: Syntheticoligonucleotide
  source 1..25: mol_type = other RNA
tgtgccaagacattaattttttttt

SEQ ID NO: 5450 - RNA, 25 nt, synthetic construct
  misc_feature 1..25: note = Description of Artificial Sequence: Syntheticoligonucleotide
  source 1..25: mol_type = other RNA
caagacattaattttttttttaaac

SEQ ID NO: 5451 - RNA, 25 nt, synthetic construct
  misc_feature 1..25: note = Description of Artificial Sequence: Syntheticoligonucleotide
  source 1..25: mol_type = other RNA
aagacattaattttttttttaaaca

SEQ ID NO: 5452 - RNA, 25 nt, synthetic construct
  misc_feature 1..25: note = Description of Artificial Sequence: Syntheticoligonucleotide
  source 1..25: mol_type = other RNA
ttaattttttttttaaacaatgaag

SEQ ID NO: 5453 - RNA, 25 nt, synthetic construct
  misc_feature 1..25: note = Description of Artificial Sequence: Syntheticoligonucleotide
  source 1..25: mol_type = other RNA
taattttttttttaaacaatgaagt

SEQ ID NO: 5454 - RNA, 25 nt, synthetic construct
  misc_feature 1..25: note = Description of Artificial Sequence: Syntheticoligonucleotide
  source 1..25: mol_type = other RNA
attttttttttaaacaatgaagtga

SEQ ID NO: 5455 - RNA, 25 nt, synthetic construct
  misc_feature 1..25: note = Description of Artificial Sequence: Syntheticoligonucleotide
  source 1..25: mol_type = other RNA
tttttttttaaacaatgaagtgaaa

SEQ ID NO: 5456 - RNA, 25 nt, synthetic construct
  misc_feature 1..25: note = Description of Artificial Sequence: Syntheticoligonucleotide
  source 1..25: mol_type = other RNA
ttttttttaaacaatgaagtgaaaa

SEQ ID NO: 5457 - RNA, 25 nt, synthetic construct
  misc_feature 1..25: note = Description of Artificial Sequence: Syntheticoligonucleotide
  source 1..25: mol_type = other RNA
tttttttaaacaatgaagtgaaaaa

SEQ ID NO: 5458 - RNA, 25 nt, synthetic construct
  misc_feature 1..25: note = Description of Artificial Sequence: Syntheticoligonucleotide
  source 1..25: mol_type = other RNA
ttttttaaacaatgaagtgaaaaag

SEQ ID NO: 5459 - RNA, 25 nt, synthetic construct
  misc_feature 1..25: note = Description of Artificial Sequence: Syntheticoligonucleotide
  source 1..25: mol_type = other RNA
tttttaaacaatgaagtgaaaaagt

SEQ ID NO: 5460 - RNA, 25 nt, synthetic construct
  misc_feature 1..25: note = Description of Artificial Sequence: Syntheticoligonucleotide
  source 1..25: mol_type = other RNA
tttaaacaatgaagtgaaaaagttt

SEQ ID NO: 5461 - RNA, 25 nt, synthetic construct
  misc_feature 1..25: note = Description of Artificial Sequence: Syntheticoligonucleotide
  source 1..25: mol_type = other RNA
ttaaacaatgaagtgaaaaagtttt

SEQ ID NO: 5462 - RNA, 25 nt, synthetic construct
  misc_feature 1..25: note = Description of Artificial Sequence: Syntheticoligonucleotide
  source 1..25: mol_type = other RNA
taaacaatgaagtgaaaaagtttta

SEQ ID NO: 5463 - RNA, 25 nt, synthetic construct
  misc_feature 1..25: note = Description of Artificial Sequence: Syntheticoligonucleotide
  source 1..25: mol_type = other RNA
gaagtgaaaaagttttacaatctct

SEQ ID NO: 5464 - RNA, 25 nt, synthetic construct
  misc_feature 1..25: note = Description of Artificial Sequence: Syntheticoligonucleotide
  source 1..25: mol_type = other RNA
aaaaagttttacaatctctaggttt

SEQ ID NO: 5465 - RNA, 25 nt, synthetic construct
  misc_feature 1..25: note = Description of Artificial Sequence: Syntheticoligonucleotide
  source 1..25: mol_type = other RNA
aaaagttttacaatctctaggtttg

SEQ ID NO: 5466 - RNA, 25 nt, synthetic construct
  misc_feature 1..25: note = Description of Artificial Sequence: Syntheticoligonucleotide
  source 1..25: mol_type = other RNA
aaagttttacaatctctaggtttgg

SEQ ID NO: 5467 - RNA, 25 nt, synthetic construct
  misc_feature 1..25: note = Description of Artificial Sequence: Syntheticoligonucleotide
  source 1..25: mol_type = other RNA
tggttaaattaacattgcataaaca

SEQ ID NO: 5468 - RNA, 25 nt, synthetic construct
  misc_feature 1..25: note = Description of Artificial Sequence: Syntheticoligonucleotide
  source 1..25: mol_type = other RNA
ggttaaattaacattgcataaacac

SEQ ID NO: 5469 - RNA, 25 nt, synthetic construct
  misc_feature 1..25: note = Description of Artificial Sequence: Syntheticoligonucleotide
  source 1..25: mol_type = other RNA
gttaaattaacattgcataaacact

SEQ ID NO: 5470 - RNA, 25 nt, synthetic construct
  misc_feature 1..25: note = Description of Artificial Sequence: Syntheticoligonucleotide
  source 1..25: mol_type = other RNA
attgcataaacacttttcaagtctg

SEQ ID NO: 5471 - RNA, 25 nt, synthetic construct
  misc_feature 1..25: note = Description of Artificial Sequence: Syntheticoligonucleotide
  source 1..25: mol_type = other RNA
aagtctgatccatatttaataatgc

SEQ ID NO: 5472 - RNA, 25 nt, synthetic construct
  misc_feature 1..25: note = Description of Artificial Sequence: Syntheticoligonucleotide
  source 1..25: mol_type = other RNA
catatttaataatgctttaaaataa

SEQ ID NO: 5473 - RNA, 25 nt, synthetic construct
  misc_feature 1..25: note = Description of Artificial Sequence: Syntheticoligonucleotide
  source 1..25: mol_type = other RNA
atatttaataatgctttaaaataaa

SEQ ID NO: 5474 - RNA, 25 nt, synthetic construct
  misc_feature 1..25: note = Description of Artificial Sequence: Syntheticoligonucleotide
  source 1..25: mol_type = other RNA
tatttaataatgctttaaaataaaa

SEQ ID NO: 5475 - RNA, 25 nt, synthetic construct
  misc_feature 1..25: note = Description of Artificial Sequence: Syntheticoligonucleotide
  source 1..25: mol_type = other RNA
atttaataatgctttaaaataaaaa

SEQ ID NO: 5476 - RNA, 25 nt, synthetic construct
  misc_feature 1..25: note = Description of Artificial Sequence: Syntheticoligonucleotide
  source 1..25: mol_type = other RNA
tttaataatgctttaaaataaaaat

SEQ ID NO: 5477 - RNA, 25 nt, synthetic construct
  misc_feature 1..25: note = Description of Artificial Sequence: Syntheticoligonucleotide
  source 1..25: mol_type = other RNA
ttaataatgctttaaaataaaaata

SEQ ID NO: 5478 - RNA, 25 nt, synthetic construct
  misc_feature 1..25: note = Description of Artificial Sequence: Syntheticoligonucleotide
  source 1..25: mol_type = other RNA
aataatgctttaaaataaaaataaa

SEQ ID NO: 5479 - RNA, 25 nt, synthetic construct
  misc_feature 1..25: note = Description of Artificial Sequence: Syntheticoligonucleotide
  source 1..25: mol_type = other RNA
ataatgctttaaaataaaaataaaa

SEQ ID NO: 5480 - RNA, 25 nt, synthetic construct
  misc_feature 1..25: note = Description of Artificial Sequence: Syntheticoligonucleotide
  source 1..25: mol_type = other RNA
taatgctttaaaataaaaataaaaa

SEQ ID NO: 5481 - RNA, 25 nt, synthetic construct
  misc_feature 1..25: note = Description of Artificial Sequence: Syntheticoligonucleotide
  source 1..25: mol_type = other RNA
aatgctttaaaataaaaataaaaac

SEQ ID NO: 5482 - RNA, 25 nt, synthetic construct
  misc_feature 1..25: note = Description of Artificial Sequence: Syntheticoligonucleotide
  source 1..25: mol_type = other RNA
taaaataaaaataaaaacaatcctt

SEQ ID NO: 5483 - RNA, 25 nt, synthetic construct
  misc_feature 1..25: note = Description of Artificial Sequence: Syntheticoligonucleotide
  source 1..25: mol_type = other RNA
aaaaataaaaacaatccttttgata

SEQ ID NO: 5484 - RNA, 25 nt, synthetic construct
  misc_feature 1..25: note = Description of Artificial Sequence: Syntheticoligonucleotide
  source 1..25: mol_type = other RNA
aaaataaaaacaatccttttgataa

SEQ ID NO: 5485 - RNA, 25 nt, synthetic construct
  misc_feature 1..25: note = Description of Artificial Sequence: Syntheticoligonucleotide
  source 1..25: mol_type = other RNA
aaataaaaacaatccttttgataaa

SEQ ID NO: 5486 - RNA, 25 nt, synthetic construct
  misc_feature 1..25: note = Description of Artificial Sequence: Syntheticoligonucleotide
  source 1..25: mol_type = other RNA
aataaaaacaatccttttgataaat

SEQ ID NO: 5487 - RNA, 25 nt, synthetic construct
  misc_feature 1..25: note = Description of Artificial Sequence: Syntheticoligonucleotide
  source 1..25: mol_type = other RNA
ataaaaacaatccttttgataaatt

SEQ ID NO: 5488 - RNA, 25 nt, synthetic construct
  misc_feature 1..25: note = Description of Artificial Sequence: Syntheticoligonucleotide
  source 1..25: mol_type = other RNA
taaaaacaatccttttgataaattt

SEQ ID NO: 5489 - RNA, 25 nt, synthetic construct
  misc_feature 1..25: note = Description of Artificial Sequence: Syntheticoligonucleotide
  source 1..25: mol_type = other RNA
aaaaacaatccttttgataaattta

SEQ ID NO: 5490 - RNA, 25 nt, synthetic construct
  misc_feature 1..25: note = Description of Artificial Sequence: Syntheticoligonucleotide
  source 1..25: mol_type = other RNA
aaaacaatccttttgataaatttaa

SEQ ID NO: 5491 - RNA, 25 nt, synthetic construct
  misc_feature 1..25: note = Description of Artificial Sequence: Syntheticoligonucleotide
  source 1..25: mol_type = other RNA
caatccttttgataaatttaaaatg

SEQ ID NO: 5492 - RNA, 25 nt, synthetic construct
  misc_feature 1..25: note = Description of Artificial Sequence: Syntheticoligonucleotide
  source 1..25: mol_type = other RNA
cttttgataaatttaaaatgttact

SEQ ID NO: 5493 - RNA, 25 nt, synthetic construct
  misc_feature 1..25: note = Description of Artificial Sequence: Syntheticoligonucleotide
  source 1..25: mol_type = other RNA
ttttgataaatttaaaatgttactt

SEQ ID NO: 5494 - RNA, 25 nt, synthetic construct
  misc_feature 1..25: note = Description of Artificial Sequence: Syntheticoligonucleotide
  source 1..25: mol_type = other RNA
tttgataaatttaaaatgttactta

SEQ ID NO: 5495 - RNA, 25 nt, synthetic construct
  misc_feature 1..25: note = Description of Artificial Sequence: Syntheticoligonucleotide
  source 1..25: mol_type = other RNA
ataaatttaaaatgttacttatttt

SEQ ID NO: 5496 - RNA, 25 nt, synthetic construct
  misc_feature 1..25: note = Description of Artificial Sequence: Syntheticoligonucleotide
  source 1..25: mol_type = other RNA
taaatttaaaatgttacttatttta

SEQ ID NO: 5497 - RNA, 25 nt, synthetic construct
  misc_feature 1..25: note = Description of Artificial Sequence: Syntheticoligonucleotide
  source 1..25: mol_type = other RNA
aaatttaaaatgttacttattttaa

SEQ ID NO: 5498 - RNA, 25 nt, synthetic construct
  misc_feature 1..25: note = Description of Artificial Sequence: Syntheticoligonucleotide
  source 1..25: mol_type = other RNA
aatttaaaatgttacttattttaaa

SEQ ID NO: 5499 - RNA, 25 nt, synthetic construct
  misc_feature 1..25: note = Description of Artificial Sequence: Syntheticoligonucleotide
  source 1..25: mol_type = other RNA
atttaaaatgttacttattttaaaa

SEQ ID NO: 5500 - RNA, 25 nt, synthetic construct
  misc_feature 1..25: note = Description of Artificial Sequence: Syntheticoligonucleotide
  source 1..25: mol_type = other RNA
tttaaaatgttacttattttaaaat

SEQ ID NO: 5501 - RNA, 25 nt, synthetic construct
  misc_feature 1..25: note = Description of Artificial Sequence: Syntheticoligonucleotide
  source 1..25: mol_type = other RNA
taaaatgttacttattttaaaataa

SEQ ID NO: 5502 - RNA, 25 nt, synthetic construct
  misc_feature 1..25: note = Description of Artificial Sequence: Syntheticoligonucleotide
  source 1..25: mol_type = other RNA
aaaatgttacttattttaaaataaa

SEQ ID NO: 5503 - RNA, 25 nt, synthetic construct
  misc_feature 1..25: note = Description of Artificial Sequence: Syntheticoligonucleotide
  source 1..25: mol_type = other RNA
aaatgttacttattttaaaataaat

SEQ ID NO: 5504 - RNA, 25 nt, synthetic construct
  misc_feature 1..25: note = Description of Artificial Sequence: Syntheticoligonucleotide
  source 1..25: mol_type = other RNA
aatgttacttattttaaaataaatg

SEQ ID NO: 5505 - RNA, 25 nt, synthetic construct
  misc_feature 1..25: note = Description of Artificial Sequence: Syntheticoligonucleotide
  source 1..25: mol_type = other RNA
atgttacttattttaaaataaatga

SEQ ID NO: 5506 - RNA, 25 nt, synthetic construct
  misc_feature 1..25: note = Description of Artificial Sequence: Syntheticoligonucleotide
  source 1..25: mol_type = other RNA
gttacttattttaaaataaatgaag

SEQ ID NO: 5507 - RNA, 25 nt, synthetic construct
  misc_feature 1..25: note = Description of Artificial Sequence: Syntheticoligonucleotide
  source 1..25: mol_type = other RNA
ttattttaaaataaatgaagtgaga

SEQ ID NO: 5508 - RNA, 25 nt, synthetic construct
  misc_feature 1..25: note = Description of Artificial Sequence: Syntheticoligonucleotide
  source 1..25: mol_type = other RNA
attttaaaataaatgaagtgagatg

SEQ ID NO: 5509 - RNA, 25 nt, synthetic construct
  misc_feature 1..25: note = Description of Artificial Sequence: Syntheticoligonucleotide
  source 1..25: mol_type = other RNA
ttttaaaataaatgaagtgagatgg

SEQ ID NO: 5510 - RNA, 25 nt, synthetic construct
  misc_feature 1..25: note = Description of Artificial Sequence: Syntheticoligonucleotide
  source 1..25: mol_type = other RNA
taaaataaatgaagtgagatggcat

SEQ ID NO: 5511 - RNA, 25 nt, synthetic construct
  misc_feature 1..25: note = Description of Artificial Sequence: Syntheticoligonucleotide
  source 1..25: mol_type = other RNA
aaaataaatgaagtgagatggcatg

SEQ ID NO: 5512 - RNA, 25 nt, synthetic construct
  misc_feature 1..25: note = Description of Artificial Sequence: Syntheticoligonucleotide
  source 1..25: mol_type = other RNA
catttcttcatgttaaaagaagtca

SEQ ID NO: 5513 - RNA, 25 nt, synthetic construct
  misc_feature 1..25: note = Description of Artificial Sequence: Syntheticoligonucleotide
  source 1..25: mol_type = other RNA
atttcttcatgttaaaagaagtcat

SEQ ID NO: 5514 - RNA, 25 nt, synthetic construct
  misc_feature 1..25: note = Description of Artificial Sequence: Syntheticoligonucleotide
  source 1..25: mol_type = other RNA
caaactcttagttttttttttttac

SEQ ID NO: 5515 - RNA, 25 nt, synthetic construct
  misc_feature 1..25: note = Description of Artificial Sequence: Syntheticoligonucleotide
  source 1..25: mol_type = other RNA
gttttttttttttacaactatgtaa

SEQ ID NO: 5516 - RNA, 25 nt, synthetic construct
  misc_feature 1..25: note = Description of Artificial Sequence: Syntheticoligonucleotide
  source 1..25: mol_type = other RNA
ttttttttttttacaactatgtaat

SEQ ID NO: 5517 - RNA, 25 nt, synthetic construct
  misc_feature 1..25: note = Description of Artificial Sequence: Syntheticoligonucleotide
  source 1..25: mol_type = other RNA
tttttttttttacaactatgtaatt

SEQ ID NO: 5518 - RNA, 25 nt, synthetic construct
  misc_feature 1..25: note = Description of Artificial Sequence: Syntheticoligonucleotide
  source 1..25: mol_type = other RNA
ttttttttttacaactatgtaattt

SEQ ID NO: 5519 - RNA, 25 nt, synthetic construct
  misc_feature 1..25: note = Description of Artificial Sequence: Syntheticoligonucleotide
  source 1..25: mol_type = other RNA
tttttttttacaactatgtaattta

SEQ ID NO: 5520 - RNA, 25 nt, synthetic construct
  misc_feature 1..25: note = Description of Artificial Sequence: Syntheticoligonucleotide
  source 1..25: mol_type = other RNA
ttttttttacaactatgtaatttat

SEQ ID NO: 5521 - RNA, 25 nt, synthetic construct
  misc_feature 1..25: note = Description of Artificial Sequence: Syntheticoligonucleotide
  source 1..25: mol_type = other RNA
tttttttacaactatgtaatttata

SEQ ID NO: 5522 - RNA, 25 nt, synthetic construct
  misc_feature 1..25: note = Description of Artificial Sequence: Syntheticoligonucleotide
  source 1..25: mol_type = other RNA
ttttttacaactatgtaatttatat

SEQ ID NO: 5523 - RNA, 25 nt, synthetic construct
  misc_feature 1..25: note = Description of Artificial Sequence: Syntheticoligonucleotide
  source 1..25: mol_type = other RNA
tttttacaactatgtaatttatatt

SEQ ID NO: 5524 - RNA, 25 nt, synthetic construct
  misc_feature 1..25: note = Description of Artificial Sequence: Syntheticoligonucleotide
  source 1..25: mol_type = other RNA
ttttacaactatgtaatttatattc

SEQ ID NO: 5525 - RNA, 25 nt, synthetic construct
  misc_feature 1..25: note = Description of Artificial Sequence: Syntheticoligonucleotide
  source 1..25: mol_type = other RNA
tttacaactatgtaatttatattcc

SEQ ID NO: 5526 - RNA, 25 nt, synthetic construct
  misc_feature 1..25: note = Description of Artificial Sequence: Syntheticoligonucleotide
  source 1..25: mol_type = other RNA
ctatgtaatttatattccatttaca

SEQ ID NO: 5527 - RNA, 25 nt, synthetic construct
  misc_feature 1..25: note = Description of Artificial Sequence: Syntheticoligonucleotide
  source 1..25: mol_type = other RNA
tatgtaatttatattccatttacat

SEQ ID NO: 5528 - RNA, 25 nt, synthetic construct
  misc_feature 1..25: note = Description of Artificial Sequence: Syntheticoligonucleotide
  source 1..25: mol_type = other RNA
atgtaatttatattccatttacata

SEQ ID NO: 5529 - RNA, 25 nt, synthetic construct
  misc_feature 1..25: note = Description of Artificial Sequence: Syntheticoligonucleotide
  source 1..25: mol_type = other RNA
tttatattccatttacataaggata

SEQ ID NO: 5530 - RNA, 25 nt, synthetic construct
  misc_feature 1..25: note = Description of Artificial Sequence: Syntheticoligonucleotide
  source 1..25: mol_type = other RNA
ttatattccatttacataaggatac

SEQ ID NO: 5531 - RNA, 25 nt, synthetic construct
  misc_feature 1..25: note = Description of Artificial Sequence: Syntheticoligonucleotide
  source 1..25: mol_type = other RNA
tatattccatttacataaggataca

SEQ ID NO: 5532 - RNA, 25 nt, synthetic construct
  misc_feature 1..25: note = Description of Artificial Sequence: Syntheticoligonucleotide
  source 1..25: mol_type = other RNA
atattccatttacataaggatacac

SEQ ID NO: 5533 - RNA, 25 nt, synthetic construct
  misc_feature 1..25: note = Description of Artificial Sequence: Syntheticoligonucleotide
  source 1..25: mol_type = other RNA
cataaggatacacttatttgtcaag

SEQ ID NO: 5534 - RNA, 25 nt, synthetic construct
  misc_feature 1..25: note = Description of Artificial Sequence: Syntheticoligonucleotide
  source 1..25: mol_type = other RNA
aggatacacttatttgtcaagctca

SEQ ID NO: 5535 - RNA, 25 nt, synthetic construct
  misc_feature 1..25: note = Description of Artificial Sequence: Syntheticoligonucleotide
  source 1..25: mol_type = other RNA
ctgtaaatttttaacctatgttaca

SEQ ID NO: 5536 - RNA, 25 nt, synthetic construct
  misc_feature 1..25: note = Description of Artificial Sequence: Syntheticoligonucleotide
  source 1..25: mol_type = other RNA
tgtaaatttttaacctatgttacac

SEQ ID NO: 5537 - RNA, 25 nt, synthetic construct
  misc_feature 1..25: note = Description of Artificial Sequence: Syntheticoligonucleotide
  source 1..25: mol_type = other RNA
gtaaatttttaacctatgttacacc

SEQ ID NO: 5538 - RNA, 25 nt, synthetic construct
  misc_feature 1..25: note = Description of Artificial Sequence: Syntheticoligonucleotide
  source 1..25: mol_type = other RNA
caagaggtgaagtttatatttgaat

SEQ ID NO: 5539 - RNA, 25 nt, synthetic construct
  misc_feature 1..25: note = Description of Artificial Sequence: Syntheticoligonucleotide
  source 1..25: mol_type = other RNA
agaggtgaagtttatatttgaatat

SEQ ID NO: 5540 - RNA, 25 nt, synthetic construct
  misc_feature 1..25: note = Description of Artificial Sequence: Syntheticoligonucleotide
  source 1..25: mol_type = other RNA
gaggtgaagtttatatttgaatatc

SEQ ID NO: 5541 - RNA, 25 nt, synthetic construct
  misc_feature 1..25: note = Description of Artificial Sequence: Syntheticoligonucleotide
  source 1..25: mol_type = other RNA
ggtgaagtttatatttgaatatcca

SEQ ID NO: 5542 - RNA, 25 nt, synthetic construct
  misc_feature 1..25: note = Description of Artificial Sequence: Syntheticoligonucleotide
  source 1..25: mol_type = other RNA
gtgaagtttatatttgaatatccat

SEQ ID NO: 5543 - RNA, 25 nt, synthetic construct
  misc_feature 1..25: note = Description of Artificial Sequence: Syntheticoligonucleotide
  source 1..25: mol_type = other RNA
gtttatatttgaatatccattctcg

SEQ ID NO: 5544 - RNA, 25 nt, synthetic construct
  misc_feature 1..25: note = Description of Artificial Sequence: Syntheticoligonucleotide
  source 1..25: mol_type = other RNA
ttgatgcagttttaatacttgtaat

SEQ ID NO: 5545 - RNA, 25 nt, synthetic construct
  misc_feature 1..25: note = Description of Artificial Sequence: Syntheticoligonucleotide
  source 1..25: mol_type = other RNA
gatgcagttttaatacttgtaattc

SEQ ID NO: 5546 - RNA, 25 nt, synthetic construct
  misc_feature 1..25: note = Description of Artificial Sequence: Syntheticoligonucleotide
  source 1..25: mol_type = other RNA
tttgacctaatcactaattttcagg

SEQ ID NO: 5547 - RNA, 25 nt, synthetic construct
  misc_feature 1..25: note = Description of Artificial Sequence: Syntheticoligonucleotide
  source 1..25: mol_type = other RNA
ctaatcactaattttcaggtggtgg

SEQ ID NO: 5548 - RNA, 25 nt, synthetic construct
  misc_feature 1..25: note = Description of Artificial Sequence: Syntheticoligonucleotide
  source 1..25: mol_type = other RNA
gtaggatttttcaaacctggtatga

SEQ ID NO: 5549 - RNA, 25 nt, synthetic construct
  misc_feature 1..25: note = Description of Artificial Sequence: Syntheticoligonucleotide
  source 1..25: mol_type = other RNA
tggaaggagaatttaataaagatag

SEQ ID NO: 5550 - RNA, 25 nt, synthetic construct
  misc_feature 1..25: note = Description of Artificial Sequence: Syntheticoligonucleotide
  source 1..25: mol_type = other RNA
aaggagaatttaataaagatagtgc

SEQ ID NO: 5551 - RNA, 25 nt, synthetic construct
  misc_feature 1..25: note = Description of Artificial Sequence: Syntheticoligonucleotide
  source 1..25: mol_type = other RNA
ggagaatttaataaagatagtgctg

SEQ ID NO: 5552 - RNA, 25 nt, synthetic construct
  misc_feature 1..25: note = Description of Artificial Sequence: Syntheticoligonucleotide
  source 1..25: mol_type = other RNA
gagaatttaataaagatagtgctga

SEQ ID NO: 5553 - RNA, 25 nt, synthetic construct
  misc_feature 1..25: note = Description of Artificial Sequence: Syntheticoligonucleotide
  source 1..25: mol_type = other RNA
atttaataaagatagtgctgaaaga

SEQ ID NO: 5554 - RNA, 25 nt, synthetic construct
  misc_feature 1..25: note = Description of Artificial Sequence: Syntheticoligonucleotide
  source 1..25: mol_type = other RNA
cttaggtaatctataactaggacta

SEQ ID NO: 5555 - RNA, 25 nt, synthetic construct
  misc_feature 1..25: note = Description of Artificial Sequence: Syntheticoligonucleotide
  source 1..25: mol_type = other RNA
ttaggtaatctataactaggactac

SEQ ID NO: 5556 - RNA, 25 nt, synthetic construct
  misc_feature 1..25: note = Description of Artificial Sequence: Syntheticoligonucleotide
  source 1..25: mol_type = other RNA
cagtaatacattccattgttttagt

SEQ ID NO: 5557 - RNA, 25 nt, synthetic construct
  misc_feature 1..25: note = Description of Artificial Sequence: Syntheticoligonucleotide
  source 1..25: mol_type = other RNA
gtaatacattccattgttttagtaa

SEQ ID NO: 5558 - RNA, 25 nt, synthetic construct
  misc_feature 1..25: note = Description of Artificial Sequence: Syntheticoligonucleotide
  source 1..25: mol_type = other RNA
taatacattccattgttttagtaac

SEQ ID NO: 5559 - RNA, 25 nt, synthetic construct
  misc_feature 1..25: note = Description of Artificial Sequence: Syntheticoligonucleotide
  source 1..25: mol_type = other RNA
aatacattccattgttttagtaacc

SEQ ID NO: 5560 - RNA, 25 nt, synthetic construct
  misc_feature 1..25: note = Description of Artificial Sequence: Syntheticoligonucleotide
  source 1..25: mol_type = other RNA
attgttttagtaaccagaaatcttc

SEQ ID NO: 5561 - RNA, 25 nt, synthetic construct
  misc_feature 1..25: note = Description of Artificial Sequence: Syntheticoligonucleotide
  source 1..25: mol_type = other RNA
cagaaatcttcatgcaatgaaaaat

SEQ ID NO: 5562 - RNA, 25 nt, synthetic construct
  misc_feature 1..25: note = Description of Artificial Sequence: Syntheticoligonucleotide
  source 1..25: mol_type = other RNA
catgcaatgaaaaatactttaattc

SEQ ID NO: 5563 - RNA, 25 nt, synthetic construct
  misc_feature 1..25: note = Description of Artificial Sequence: Syntheticoligonucleotide
  source 1..25: mol_type = other RNA
tgaaaaatactttaattcatgaagc

SEQ ID NO: 5564 - RNA, 25 nt, synthetic construct
  misc_feature 1..25: note = Description of Artificial Sequence: Syntheticoligonucleotide
  source 1..25: mol_type = other RNA
aaaaatactttaattcatgaagctt

SEQ ID NO: 5565 - RNA, 25 nt, synthetic construct
  misc_feature 1..25: note = Description of Artificial Sequence: Syntheticoligonucleotide
  source 1..25: mol_type = other RNA
aaaatactttaattcatgaagctta

SEQ ID NO: 5566 - RNA, 25 nt, synthetic construct
  misc_feature 1..25: note = Description of Artificial Sequence: Syntheticoligonucleotide
  source 1..25: mol_type = other RNA
catgaagcttactttttttttttgg

SEQ ID NO: 5567 - RNA, 25 nt, synthetic construct
  misc_feature 1..25: note = Description of Artificial Sequence: Syntheticoligonucleotide
  source 1..25: mol_type = other RNA
gaagcttactttttttttttggtgt

SEQ ID NO: 5568 - RNA, 25 nt, synthetic construct
  misc_feature 1..25: note = Description of Artificial Sequence: Syntheticoligonucleotide
  source 1..25: mol_type = other RNA
cttactttttttttttggtgtcaga

SEQ ID NO: 5569 - RNA, 25 nt, synthetic construct
  misc_feature 1..25: note = Description of Artificial Sequence: Syntheticoligonucleotide
  source 1..25: mol_type = other RNA
ctttttttttttggtgtcagagtct

SEQ ID NO: 5570 - RNA, 25 nt, synthetic construct
  misc_feature 1..25: note = Description of Artificial Sequence: Syntheticoligonucleotide
  source 1..25: mol_type = other RNA
tttttttttttggtgtcagagtctc

SEQ ID NO: 5571 - RNA, 25 nt, synthetic construct
  misc_feature 1..25: note = Description of Artificial Sequence: Syntheticoligonucleotide
  source 1..25: mol_type = other RNA
ctaatttttgtatttttaggagaga

SEQ ID NO: 5572 - RNA, 25 nt, synthetic construct
  misc_feature 1..25: note = Description of Artificial Sequence: Syntheticoligonucleotide
  source 1..25: mol_type = other RNA
atttttgtatttttaggagagacgg

SEQ ID NO: 5573 - RNA, 25 nt, synthetic construct
  misc_feature 1..25: note = Description of Artificial Sequence: Syntheticoligonucleotide
  source 1..25: mol_type = other RNA
catttattcagcaaatatttattga

SEQ ID NO: 5574 - RNA, 25 nt, synthetic construct
  misc_feature 1..25: note = Description of Artificial Sequence: Syntheticoligonucleotide
  source 1..25: mol_type = other RNA
tttattcagcaaatatttattgagt

SEQ ID NO: 5575 - RNA, 25 nt, synthetic construct
  misc_feature 1..25: note = Description of Artificial Sequence: Syntheticoligonucleotide
  source 1..25: mol_type = other RNA
tattcagcaaatatttattgagtgc

SEQ ID NO: 5576 - RNA, 25 nt, synthetic construct
  misc_feature 1..25: note = Description of Artificial Sequence: Syntheticoligonucleotide
  source 1..25: mol_type = other RNA
ttttagttttgcaaagaaggggttt

SEQ ID NO: 5577 - RNA, 25 nt, synthetic construct
  misc_feature 1..25: note = Description of Artificial Sequence: Syntheticoligonucleotide
  source 1..25: mol_type = other RNA
ctataattgttttgctacgattcca

SEQ ID NO: 5578 - RNA, 25 nt, synthetic construct
  misc_feature 1..25: note = Description of Artificial Sequence: Syntheticoligonucleotide
  source 1..25: mol_type = other RNA
ctttatgtaaatcacttcattgttt

SEQ ID NO: 5579 - RNA, 25 nt, synthetic construct
  misc_feature 1..25: note = Description of Artificial Sequence: Syntheticoligonucleotide
  source 1..25: mol_type = other RNA
tttatgtaaatcacttcattgtttt

SEQ ID NO: 5580 - RNA, 25 nt, synthetic construct
  misc_feature 1..25: note = Description of Artificial Sequence: Syntheticoligonucleotide
  source 1..25: mol_type = other RNA
ttatgtaaatcacttcattgtttta

SEQ ID NO: 5581 - RNA, 25 nt, synthetic construct
  misc_feature 1..25: note = Description of Artificial Sequence: Syntheticoligonucleotide
  source 1..25: mol_type = other RNA
tatgtaaatcacttcattgttttaa

SEQ ID NO: 5582 - RNA, 25 nt, synthetic construct
  misc_feature 1..25: note = Description of Artificial Sequence: Syntheticoligonucleotide
  source 1..25: mol_type = other RNA
atgtaaatcacttcattgttttaaa

SEQ ID NO: 5583 - RNA, 25 nt, synthetic construct
  misc_feature 1..25: note = Description of Artificial Sequence: Syntheticoligonucleotide
  source 1..25: mol_type = other RNA
tgtaaatcacttcattgttttaaag

SEQ ID NO: 5584 - RNA, 25 nt, synthetic construct
  misc_feature 1..25: note = Description of Artificial Sequence: Syntheticoligonucleotide
  source 1..25: mol_type = other RNA
gtaaatcacttcattgttttaaagg

SEQ ID NO: 5585 - RNA, 25 nt, synthetic construct
  misc_feature 1..25: note = Description of Artificial Sequence: Syntheticoligonucleotide
  source 1..25: mol_type = other RNA
tgttttaaaggaataaacttgatta

SEQ ID NO: 5586 - RNA, 25 nt, synthetic construct
  misc_feature 1..25: note = Description of Artificial Sequence: Syntheticoligonucleotide
  source 1..25: mol_type = other RNA
gttttaaaggaataaacttgattat

SEQ ID NO: 5587 - RNA, 25 nt, synthetic construct
  misc_feature 1..25: note = Description of Artificial Sequence: Syntheticoligonucleotide
  source 1..25: mol_type = other RNA
ttaaaggaataaacttgattatatt

SEQ ID NO: 5588 - RNA, 25 nt, synthetic construct
  misc_feature 1..25: note = Description of Artificial Sequence: Syntheticoligonucleotide
  source 1..25: mol_type = other RNA
taaaggaataaacttgattatattg

SEQ ID NO: 5589 - RNA, 25 nt, synthetic construct
  misc_feature 1..25: note = Description of Artificial Sequence: Syntheticoligonucleotide
  source 1..25: mol_type = other RNA
aaaggaataaacttgattatattgt

SEQ ID NO: 5590 - RNA, 25 nt, synthetic construct
  misc_feature 1..25: note = Description of Artificial Sequence: Syntheticoligonucleotide
  source 1..25: mol_type = other RNA
aggaataaacttgattatattgttt

SEQ ID NO: 5591 - RNA, 25 nt, synthetic construct
  misc_feature 1..25: note = Description of Artificial Sequence: Syntheticoligonucleotide
  source 1..25: mol_type = other RNA
ggaataaacttgattatattgtttt

SEQ ID NO: 5592 - RNA, 25 nt, synthetic construct
  misc_feature 1..25: note = Description of Artificial Sequence: Syntheticoligonucleotide
  source 1..25: mol_type = other RNA
gaataaacttgattatattgttttt

SEQ ID NO: 5593 - RNA, 25 nt, synthetic construct
  misc_feature 1..25: note = Description of Artificial Sequence: Syntheticoligonucleotide
  source 1..25: mol_type = other RNA
aataaacttgattatattgtttttt

SEQ ID NO: 5594 - RNA, 25 nt, synthetic construct
  misc_feature 1..25: note = Description of Artificial Sequence: Syntheticoligonucleotide
  source 1..25: mol_type = other RNA
ataaacttgattatattgttttttt

SEQ ID NO: 5595 - RNA, 25 nt, synthetic construct
  misc_feature 1..25: note = Description of Artificial Sequence: Syntheticoligonucleotide
  source 1..25: mol_type = other RNA
cttgattatattgtttttttatttg

SEQ ID NO: 5596 - RNA, 25 nt, synthetic construct
  misc_feature 1..25: note = Description of Artificial Sequence: Syntheticoligonucleotide
  source 1..25: mol_type = other RNA
ttgattatattgtttttttatttgg

SEQ ID NO: 5597 - RNA, 25 nt, synthetic construct
  misc_feature 1..25: note = Description of Artificial Sequence: Syntheticoligonucleotide
  source 1..25: mol_type = other RNA
attatattgtttttttatttggcat

SEQ ID NO: 5598 - RNA, 25 nt, synthetic construct
  misc_feature 1..25: note = Description of Artificial Sequence: Syntheticoligonucleotide
  source 1..25: mol_type = other RNA
attgtttttttatttggcataactg

SEQ ID NO: 5599 - RNA, 25 nt, synthetic construct
  misc_feature 1..25: note = Description of Artificial Sequence: Syntheticoligonucleotide
  source 1..25: mol_type = other RNA
ttgtttttttatttggcataactgt

SEQ ID NO: 5600 - RNA, 25 nt, synthetic construct
  misc_feature 1..25: note = Description of Artificial Sequence: Syntheticoligonucleotide
  source 1..25: mol_type = other RNA
ttttttatttggcataactgtgatt

SEQ ID NO: 5601 - RNA, 25 nt, synthetic construct
  misc_feature 1..25: note = Description of Artificial Sequence: Syntheticoligonucleotide
  source 1..25: mol_type = other RNA
tttttatttggcataactgtgattc

SEQ ID NO: 5602 - RNA, 25 nt, synthetic construct
  misc_feature 1..25: note = Description of Artificial Sequence: Syntheticoligonucleotide
  source 1..25: mol_type = other RNA
ataactgtgattcttttaggacaat

SEQ ID NO: 5603 - RNA, 25 nt, synthetic construct
  misc_feature 1..25: note = Description of Artificial Sequence: Syntheticoligonucleotide
  source 1..25: mol_type = other RNA
tgtgattcttttaggacaattactg

SEQ ID NO: 5604 - RNA, 25 nt, synthetic construct
  misc_feature 1..25: note = Description of Artificial Sequence: Syntheticoligonucleotide
  source 1..25: mol_type = other RNA
gtgattcttttaggacaattactgt

SEQ ID NO: 5605 - RNA, 25 nt, synthetic construct
  misc_feature 1..25: note = Description of Artificial Sequence: Syntheticoligonucleotide
  source 1..25: mol_type = other RNA
tgtatgtcagatattcatattgacc

SEQ ID NO: 5606 - RNA, 25 nt, synthetic construct
  misc_feature 1..25: note = Description of Artificial Sequence: Syntheticoligonucleotide
  source 1..25: mol_type = other RNA
gtatgtcagatattcatattgaccc

SEQ ID NO: 5607 - RNA, 25 nt, synthetic construct
  misc_feature 1..25: note = Description of Artificial Sequence: Syntheticoligonucleotide
  source 1..25: mol_type = other RNA
aatgtgtaatattccagttttctct

SEQ ID NO: 5608 - RNA, 25 nt, synthetic construct
  misc_feature 1..25: note = Description of Artificial Sequence: Syntheticoligonucleotide
  source 1..25: mol_type = other RNA
taagtaattaaaatatacttaaaaa

SEQ ID NO: 5609 - RNA, 25 nt, synthetic construct
  misc_feature 1..25: note = Description of Artificial Sequence: Syntheticoligonucleotide
  source 1..25: mol_type = other RNA
aagtaattaaaatatacttaaaaat

SEQ ID NO: 5610 - RNA, 25 nt, synthetic construct
  misc_feature 1..25: note = Description of Artificial Sequence: Syntheticoligonucleotide
  source 1..25: mol_type = other RNA
agtaattaaaatatacttaaaaatt

SEQ ID NO: 5611 - RNA, 25 nt, synthetic construct
  misc_feature 1..25: note = Description of Artificial Sequence: Syntheticoligonucleotide
  source 1..25: mol_type = other RNA
gtaattaaaatatacttaaaaatta

SEQ ID NO: 5612 - RNA, 25 nt, synthetic construct
  misc_feature 1..25: note = Description of Artificial Sequence: Syntheticoligonucleotide
  source 1..25: mol_type = other RNA
taattaaaatatacttaaaaattaa

SEQ ID NO: 5613 - RNA, 25 nt, synthetic construct
  misc_feature 1..25: note = Description of Artificial Sequence: Syntheticoligonucleotide
  source 1..25: mol_type = other RNA
aattaaaatatacttaaaaattaat

SEQ ID NO: 5614 - RNA, 25 nt, synthetic construct
  misc_feature 1..25: note = Description of Artificial Sequence: Syntheticoligonucleotide
  source 1..25: mol_type = other RNA
attaaaatatacttaaaaattaata

SEQ ID NO: 5615 - RNA, 25 nt, synthetic construct
  misc_feature 1..25: note = Description of Artificial Sequence: Syntheticoligonucleotide
  source 1..25: mol_type = other RNA
ttaaaatatacttaaaaattaatag

SEQ ID NO: 5616 - RNA, 25 nt, synthetic construct
  misc_feature 1..25: note = Description of Artificial Sequence: Syntheticoligonucleotide
  source 1..25: mol_type = other RNA
taaaatatacttaaaaattaatagt

SEQ ID NO: 5617 - RNA, 25 nt, synthetic construct
  misc_feature 1..25: note = Description of Artificial Sequence: Syntheticoligonucleotide
  source 1..25: mol_type = other RNA
aaatatacttaaaaattaatagttt

SEQ ID NO: 5618 - RNA, 25 nt, synthetic construct
  misc_feature 1..25: note = Description of Artificial Sequence: Syntheticoligonucleotide
  source 1..25: mol_type = other RNA
aatatacttaaaaattaatagtttt

SEQ ID NO: 5619 - RNA, 25 nt, synthetic construct
  misc_feature 1..25: note = Description of Artificial Sequence: Syntheticoligonucleotide
  source 1..25: mol_type = other RNA
atatacttaaaaattaatagtttta

SEQ ID NO: 5620 - RNA, 25 nt, synthetic construct
  misc_feature 1..25: note = Description of Artificial Sequence: Syntheticoligonucleotide
  source 1..25: mol_type = other RNA
tatacttaaaaattaatagttttat

SEQ ID NO: 5621 - RNA, 25 nt, synthetic construct
  misc_feature 1..25: note = Description of Artificial Sequence: Syntheticoligonucleotide
  source 1..25: mol_type = other RNA
cttaaaaattaatagttttatctgg

SEQ ID NO: 5622 - RNA, 25 nt, synthetic construct
  misc_feature 1..25: note = Description of Artificial Sequence: Syntheticoligonucleotide
  source 1..25: mol_type = other RNA
aaaattaatagttttatctgggtac

SEQ ID NO: 5623 - RNA, 25 nt, synthetic construct
  misc_feature 1..25: note = Description of Artificial Sequence: Syntheticoligonucleotide
  source 1..25: mol_type = other RNA
aaattaatagttttatctgggtaca

SEQ ID NO: 5624 - RNA, 25 nt, synthetic construct
  misc_feature 1..25: note = Description of Artificial Sequence: Syntheticoligonucleotide
  source 1..25: mol_type = other RNA
aattaatagttttatctgggtacaa

SEQ ID NO: 5625 - RNA, 25 nt, synthetic construct
  misc_feature 1..25: note = Description of Artificial Sequence: Syntheticoligonucleotide
  source 1..25: mol_type = other RNA
ctgggtacaaataaacaggtgcctg

SEQ ID NO: 5626 - RNA, 25 nt, synthetic construct
  misc_feature 1..25: note = Description of Artificial Sequence: Syntheticoligonucleotide
  source 1..25: mol_type = other RNA
caaggaaacttctatgtaaaaatca

SEQ ID NO: 5627 - RNA, 25 nt, synthetic construct
  misc_feature 1..25: note = Description of Artificial Sequence: Syntheticoligonucleotide
  source 1..25: mol_type = other RNA
aaggaaacttctatgtaaaaatcac

SEQ ID NO: 5628 - RNA, 25 nt, synthetic construct
  misc_feature 1..25: note = Description of Artificial Sequence: Syntheticoligonucleotide
  source 1..25: mol_type = other RNA
aggaaacttctatgtaaaaatcact

SEQ ID NO: 5629 - RNA, 25 nt, synthetic construct
  misc_feature 1..25: note = Description of Artificial Sequence: Syntheticoligonucleotide
  source 1..25: mol_type = other RNA
ctatgtaaaaatcactatgatttct

SEQ ID NO: 5630 - RNA, 25 nt, synthetic construct
  misc_feature 1..25: note = Description of Artificial Sequence: Syntheticoligonucleotide
  source 1..25: mol_type = other RNA
tatgtaaaaatcactatgatttctg

SEQ ID NO: 5631 - RNA, 25 nt, synthetic construct
  misc_feature 1..25: note = Description of Artificial Sequence: Syntheticoligonucleotide
  source 1..25: mol_type = other RNA
atgtaaaaatcactatgatttctga

SEQ ID NO: 5632 - RNA, 25 nt, synthetic construct
  misc_feature 1..25: note = Description of Artificial Sequence: Syntheticoligonucleotide
  source 1..25: mol_type = other RNA
aaaaatcactatgatttctgaattg

SEQ ID NO: 5633 - RNA, 25 nt, synthetic construct
  misc_feature 1..25: note = Description of Artificial Sequence: Syntheticoligonucleotide
  source 1..25: mol_type = other RNA
aaaatcactatgatttctgaattgc

SEQ ID NO: 5634 - RNA, 25 nt, synthetic construct
  misc_feature 1..25: note = Description of Artificial Sequence: Syntheticoligonucleotide
  source 1..25: mol_type = other RNA
atgatttctgaattgctatgtgaaa

SEQ ID NO: 5635 - RNA, 25 nt, synthetic construct
  misc_feature 1..25: note = Description of Artificial Sequence: Syntheticoligonucleotide
  source 1..25: mol_type = other RNA
tgatttctgaattgctatgtgaaac

SEQ ID NO: 5636 - RNA, 25 nt, synthetic construct
  misc_feature 1..25: note = Description of Artificial Sequence: Syntheticoligonucleotide
  source 1..25: mol_type = other RNA
tgtgaaactacagatctttggaaca

SEQ ID NO: 5637 - RNA, 25 nt, synthetic construct
  misc_feature 1..25: note = Description of Artificial Sequence: Syntheticoligonucleotide
  source 1..25: mol_type = other RNA
gtgaaactacagatctttggaacac

SEQ ID NO: 5638 - RNA, 25 nt, synthetic construct
  misc_feature 1..25: note = Description of Artificial Sequence: Syntheticoligonucleotide
  source 1..25: mol_type = other RNA
ggtgttaagacttacacagtacctc

SEQ ID NO: 5639 - RNA, 25 nt, synthetic construct
  misc_feature 1..25: note = Description of Artificial Sequence: Syntheticoligonucleotide
  source 1..25: mol_type = other RNA
taggcctcttgaatttttgatgtag

SEQ ID NO: 5640 - RNA, 25 nt, synthetic construct
  misc_feature 1..25: note = Description of Artificial Sequence: Syntheticoligonucleotide
  source 1..25: mol_type = other RNA
ttgaatttttgatgtagatgggcat

SEQ ID NO: 5641 - RNA, 25 nt, synthetic construct
  misc_feature 1..25: note = Description of Artificial Sequence: Syntheticoligonucleotide
  source 1..25: mol_type = other RNA
tgaatttttgatgtagatgggcatt

SEQ ID NO: 5642 - RNA, 25 nt, synthetic construct
  misc_feature 1..25: note = Description of Artificial Sequence: Syntheticoligonucleotide
  source 1..25: mol_type = other RNA
gatgggcatttttttaaggtagtgg

SEQ ID NO: 5643 - RNA, 25 nt, synthetic construct
  misc_feature 1..25: note = Description of Artificial Sequence: Syntheticoligonucleotide
  source 1..25: mol_type = other RNA
catttttttaaggtagtggttaatt

SEQ ID NO: 5644 - RNA, 25 nt, synthetic construct
  misc_feature 1..25: note = Description of Artificial Sequence: Syntheticoligonucleotide
  source 1..25: mol_type = other RNA
gtagtggttaattacctttatgtga

SEQ ID NO: 5645 - RNA, 25 nt, synthetic construct
  misc_feature 1..25: note = Description of Artificial Sequence: Syntheticoligonucleotide
  source 1..25: mol_type = other RNA
agtggttaattacctttatgtgaac

SEQ ID NO: 5646 - RNA, 25 nt, synthetic construct
  misc_feature 1..25: note = Description of Artificial Sequence: Syntheticoligonucleotide
  source 1..25: mol_type = other RNA
gtggttaattacctttatgtgaact

SEQ ID NO: 5647 - RNA, 25 nt, synthetic construct
  misc_feature 1..25: note = Description of Artificial Sequence: Syntheticoligonucleotide
  source 1..25: mol_type = other RNA
tggttaattacctttatgtgaactt

SEQ ID NO: 5648 - RNA, 25 nt, synthetic construct
  misc_feature 1..25: note = Description of Artificial Sequence: Syntheticoligonucleotide
  source 1..25: mol_type = other RNA
ggttaattacctttatgtgaacttt

SEQ ID NO: 5649 - RNA, 25 nt, synthetic construct
  misc_feature 1..25: note = Description of Artificial Sequence: Syntheticoligonucleotide
  source 1..25: mol_type = other RNA
ctttatgtgaactttgaatggttta

SEQ ID NO: 5650 - RNA, 25 nt, synthetic construct
  misc_feature 1..25: note = Description of Artificial Sequence: Syntheticoligonucleotide
  source 1..25: mol_type = other RNA
tgtgaactttgaatggtttaacaaa

SEQ ID NO: 5651 - RNA, 25 nt, synthetic construct
  misc_feature 1..25: note = Description of Artificial Sequence: Syntheticoligonucleotide
  source 1..25: mol_type = other RNA
ctttgaatggtttaacaaaagattt

SEQ ID NO: 5652 - RNA, 25 nt, synthetic construct
  misc_feature 1..25: note = Description of Artificial Sequence: Syntheticoligonucleotide
  source 1..25: mol_type = other RNA
gaatggtttaacaaaagatttgttt

SEQ ID NO: 5653 - RNA, 25 nt, synthetic construct
  misc_feature 1..25: note = Description of Artificial Sequence: Syntheticoligonucleotide
  source 1..25: mol_type = other RNA
aatggtttaacaaaagatttgtttt

SEQ ID NO: 5654 - RNA, 25 nt, synthetic construct
  misc_feature 1..25: note = Description of Artificial Sequence: Syntheticoligonucleotide
  source 1..25: mol_type = other RNA
atggtttaacaaaagatttgttttt

SEQ ID NO: 5655 - RNA, 25 nt, synthetic construct
  misc_feature 1..25: note = Description of Artificial Sequence: Syntheticoligonucleotide
  source 1..25: mol_type = other RNA
tggtttaacaaaagatttgtttttg

SEQ ID NO: 5656 - RNA, 25 nt, synthetic construct
  misc_feature 1..25: note = Description of Artificial Sequence: Syntheticoligonucleotide
  source 1..25: mol_type = other RNA
ggtttaacaaaagatttgtttttgt

SEQ ID NO: 5657 - RNA, 25 nt, synthetic construct
  misc_feature 1..25: note = Description of Artificial Sequence: Syntheticoligonucleotide
  source 1..25: mol_type = other RNA
tttaacaaaagatttgtttttgtag

SEQ ID NO: 5658 - RNA, 25 nt, synthetic construct
  misc_feature 1..25: note = Description of Artificial Sequence: Syntheticoligonucleotide
  source 1..25: mol_type = other RNA
ttaacaaaagatttgtttttgtaga

SEQ ID NO: 5659 - RNA, 25 nt, synthetic construct
  misc_feature 1..25: note = Description of Artificial Sequence: Syntheticoligonucleotide
  source 1..25: mol_type = other RNA
caaaagatttgtttttgtagagatt

SEQ ID NO: 5660 - RNA, 25 nt, synthetic construct
  misc_feature 1..25: note = Description of Artificial Sequence: Syntheticoligonucleotide
  source 1..25: mol_type = other RNA
aaaagatttgtttttgtagagattt

SEQ ID NO: 5661 - RNA, 25 nt, synthetic construct
  misc_feature 1..25: note = Description of Artificial Sequence: Syntheticoligonucleotide
  source 1..25: mol_type = other RNA
aaagatttgtttttgtagagatttt

SEQ ID NO: 5662 - RNA, 25 nt, synthetic construct
  misc_feature 1..25: note = Description of Artificial Sequence: Syntheticoligonucleotide
  source 1..25: mol_type = other RNA
agatttgtttttgtagagattttaa

SEQ ID NO: 5663 - RNA, 25 nt, synthetic construct
  misc_feature 1..25: note = Description of Artificial Sequence: Syntheticoligonucleotide
  source 1..25: mol_type = other RNA
gatttgtttttgtagagattttaaa

SEQ ID NO: 5664 - RNA, 25 nt, synthetic construct
  misc_feature 1..25: note = Description of Artificial Sequence: Syntheticoligonucleotide
  source 1..25: mol_type = other RNA
atttgtttttgtagagattttaaag

SEQ ID NO: 5665 - RNA, 25 nt, synthetic construct
  misc_feature 1..25: note = Description of Artificial Sequence: Syntheticoligonucleotide
  source 1..25: mol_type = other RNA
tttgtttttgtagagattttaaagg

SEQ ID NO: 5666 - RNA, 25 nt, synthetic construct
  misc_feature 1..25: note = Description of Artificial Sequence: Syntheticoligonucleotide
  source 1..25: mol_type = other RNA
tttgtagagattttaaagggggaga

SEQ ID NO: 5667 - RNA, 25 nt, synthetic construct
  misc_feature 1..25: note = Description of Artificial Sequence: Syntheticoligonucleotide
  source 1..25: mol_type = other RNA
gggggagaattctagaaataaatgt

SEQ ID NO: 5668 - RNA, 25 nt, synthetic construct
  misc_feature 1..25: note = Description of Artificial Sequence: Syntheticoligonucleotide
  source 1..25: mol_type = other RNA
gggagaattctagaaataaatgtta

SEQ ID NO: 5669 - RNA, 25 nt, synthetic construct
  misc_feature 1..25: note = Description of Artificial Sequence: Syntheticoligonucleotide
  source 1..25: mol_type = other RNA
ggagaattctagaaataaatgttac

SEQ ID NO: 5670 - RNA, 25 nt, synthetic construct
  misc_feature 1..25: note = Description of Artificial Sequence: Syntheticoligonucleotide
  source 1..25: mol_type = other RNA
gagaattctagaaataaatgttacc

SEQ ID NO: 5671 - RNA, 25 nt, synthetic construct
  misc_feature 1..25: note = Description of Artificial Sequence: Syntheticoligonucleotide
  source 1..25: mol_type = other RNA
agaattctagaaataaatgttacct

SEQ ID NO: 5672 - RNA, 25 nt, synthetic construct
  misc_feature 1..25: note = Description of Artificial Sequence: Syntheticoligonucleotide
  source 1..25: mol_type = other RNA
gaattctagaaataaatgttaccta

SEQ ID NO: 5673 - RNA, 25 nt, synthetic construct
  misc_feature 1..25: note = Description of Artificial Sequence: Syntheticoligonucleotide
  source 1..25: mol_type = other RNA
ctagaaataaatgttacctaattat

SEQ ID NO: 5674 - RNA, 25 nt, synthetic construct
  misc_feature 1..25: note = Description of Artificial Sequence: Syntheticoligonucleotide
  source 1..25: mol_type = other RNA
tagaaataaatgttacctaattatt

SEQ ID NO: 5675 - RNA, 25 nt, synthetic construct
  misc_feature 1..25: note = Description of Artificial Sequence: Syntheticoligonucleotide
  source 1..25: mol_type = other RNA
agaaataaatgttacctaattatta

SEQ ID NO: 5676 - RNA, 25 nt, synthetic construct
  misc_feature 1..25: note = Description of Artificial Sequence: Syntheticoligonucleotide
  source 1..25: mol_type = other RNA
gaaataaatgttacctaattattac

SEQ ID NO: 5677 - RNA, 25 nt, synthetic construct
  misc_feature 1..25: note = Description of Artificial Sequence: Syntheticoligonucleotide
  source 1..25: mol_type = other RNA
aaataaatgttacctaattattaca

SEQ ID NO: 5678 - RNA, 25 nt, synthetic construct
  misc_feature 1..25: note = Description of Artificial Sequence: Syntheticoligonucleotide
  source 1..25: mol_type = other RNA
ataaatgttacctaattattacagc

SEQ ID NO: 5679 - RNA, 25 nt, synthetic construct
  misc_feature 1..25: note = Description of Artificial Sequence: Syntheticoligonucleotide
  source 1..25: mol_type = other RNA
ctaattattacagccttaaagacaa

SEQ ID NO: 5680 - RNA, 25 nt, synthetic construct
  misc_feature 1..25: note = Description of Artificial Sequence: Syntheticoligonucleotide
  source 1..25: mol_type = other RNA
taattattacagccttaaagacaaa

SEQ ID NO: 5681 - RNA, 25 nt, synthetic construct
  misc_feature 1..25: note = Description of Artificial Sequence: Syntheticoligonucleotide
  source 1..25: mol_type = other RNA
ttaaagacaaaaatccttgttgaag

SEQ ID NO: 5682 - RNA, 25 nt, synthetic construct
  misc_feature 1..25: note = Description of Artificial Sequence: Syntheticoligonucleotide
  source 1..25: mol_type = other RNA
aagacaaaaatccttgttgaagttt

SEQ ID NO: 5683 - RNA, 25 nt, synthetic construct
  misc_feature 1..25: note = Description of Artificial Sequence: Syntheticoligonucleotide
  source 1..25: mol_type = other RNA
cttgttgaagtttttttaaaaaaag

SEQ ID NO: 5684 - RNA, 25 nt, synthetic construct
  misc_feature 1..25: note = Description of Artificial Sequence: Syntheticoligonucleotide
  source 1..25: mol_type = other RNA
ttgttgaagtttttttaaaaaaagc

SEQ ID NO: 5685 - RNA, 25 nt, synthetic construct
  misc_feature 1..25: note = Description of Artificial Sequence: Syntheticoligonucleotide
  source 1..25: mol_type = other RNA
gttgaagtttttttaaaaaaagcta

SEQ ID NO: 5686 - RNA, 25 nt, synthetic construct
  misc_feature 1..25: note = Description of Artificial Sequence: Syntheticoligonucleotide
  source 1..25: mol_type = other RNA
ttgaagtttttttaaaaaaagctaa

SEQ ID NO: 5687 - RNA, 25 nt, synthetic construct
  misc_feature 1..25: note = Description of Artificial Sequence: Syntheticoligonucleotide
  source 1..25: mol_type = other RNA
agtttttttaaaaaaagctaaatta

SEQ ID NO: 5688 - RNA, 25 nt, synthetic construct
  misc_feature 1..25: note = Description of Artificial Sequence: Syntheticoligonucleotide
  source 1..25: mol_type = other RNA
gtttttttaaaaaaagctaaattac

SEQ ID NO: 5689 - RNA, 25 nt, synthetic construct
  misc_feature 1..25: note = Description of Artificial Sequence: Syntheticoligonucleotide
  source 1..25: mol_type = other RNA
tttttttaaaaaaagctaaattaca

SEQ ID NO: 5690 - RNA, 25 nt, synthetic construct
  misc_feature 1..25: note = Description of Artificial Sequence: Syntheticoligonucleotide
  source 1..25: mol_type = other RNA
ttttttaaaaaaagctaaattacat

SEQ ID NO: 5691 - RNA, 25 nt, synthetic construct
  misc_feature 1..25: note = Description of Artificial Sequence: Syntheticoligonucleotide
  source 1..25: mol_type = other RNA
tttttaaaaaaagctaaattacata

SEQ ID NO: 5692 - RNA, 25 nt, synthetic construct
  misc_feature 1..25: note = Description of Artificial Sequence: Syntheticoligonucleotide
  source 1..25: mol_type = other RNA
taaaaaaagctaaattacatagact

SEQ ID NO: 5693 - RNA, 25 nt, synthetic construct
  misc_feature 1..25: note = Description of Artificial Sequence: Syntheticoligonucleotide
  source 1..25: mol_type = other RNA
aaaaaagctaaattacatagactta

SEQ ID NO: 5694 - RNA, 25 nt, synthetic construct
  misc_feature 1..25: note = Description of Artificial Sequence: Syntheticoligonucleotide
  source 1..25: mol_type = other RNA
ttaggcattaacatgtttgtggaag

SEQ ID NO: 5695 - RNA, 25 nt, synthetic construct
  misc_feature 1..25: note = Description of Artificial Sequence: Syntheticoligonucleotide
  source 1..25: mol_type = other RNA
taggcattaacatgtttgtggaaga

SEQ ID NO: 5696 - RNA, 25 nt, synthetic construct
  misc_feature 1..25: note = Description of Artificial Sequence: Syntheticoligonucleotide
  source 1..25: mol_type = other RNA
cagacgtatattgtatcatttgagt

SEQ ID NO: 5697 - RNA, 25 nt, synthetic construct
  misc_feature 1..25: note = Description of Artificial Sequence: Syntheticoligonucleotide
  source 1..25: mol_type = other RNA
cgtatattgtatcatttgagtgaat

SEQ ID NO: 5698 - RNA, 25 nt, synthetic construct
  misc_feature 1..25: note = Description of Artificial Sequence: Syntheticoligonucleotide
  source 1..25: mol_type = other RNA
tatattgtatcatttgagtgaatgt

SEQ ID NO: 5699 - RNA, 25 nt, synthetic construct
  misc_feature 1..25: note = Description of Artificial Sequence: Syntheticoligonucleotide
  source 1..25: mol_type = other RNA
attgtatcatttgagtgaatgttcc

SEQ ID NO: 5700 - RNA, 25 nt, synthetic construct
  misc_feature 1..25: note = Description of Artificial Sequence: Syntheticoligonucleotide
  source 1..25: mol_type = other RNA
ttgtatcatttgagtgaatgttccc

SEQ ID NO: 5701 - RNA, 25 nt, synthetic construct
  misc_feature 1..25: note = Description of Artificial Sequence: Syntheticoligonucleotide
  source 1..25: mol_type = other RNA
tgtatcatttgagtgaatgttccca

SEQ ID NO: 5702 - RNA, 25 nt, synthetic construct
  misc_feature 1..25: note = Description of Artificial Sequence: Syntheticoligonucleotide
  source 1..25: mol_type = other RNA
aggaatttagaacctaacttttata

SEQ ID NO: 5703 - RNA, 25 nt, synthetic construct
  misc_feature 1..25: note = Description of Artificial Sequence: Syntheticoligonucleotide
  source 1..25: mol_type = other RNA
ggaatttagaacctaacttttatag

SEQ ID NO: 5704 - RNA, 25 nt, synthetic construct
  misc_feature 1..25: note = Description of Artificial Sequence: Syntheticoligonucleotide
  source 1..25: mol_type = other RNA
tttagaacctaacttttataggtta

SEQ ID NO: 5705 - RNA, 25 nt, synthetic construct
  misc_feature 1..25: note = Description of Artificial Sequence: Syntheticoligonucleotide
  source 1..25: mol_type = other RNA
ttagaacctaacttttataggttat

SEQ ID NO: 5706 - RNA, 25 nt, synthetic construct
  misc_feature 1..25: note = Description of Artificial Sequence: Syntheticoligonucleotide
  source 1..25: mol_type = other RNA
tagaacctaacttttataggttatc

SEQ ID NO: 5707 - RNA, 25 nt, synthetic construct
  misc_feature 1..25: note = Description of Artificial Sequence: Syntheticoligonucleotide
  source 1..25: mol_type = other RNA
agaacctaacttttataggttatca

SEQ ID NO: 5708 - RNA, 25 nt, synthetic construct
  misc_feature 1..25: note = Description of Artificial Sequence: Syntheticoligonucleotide
  source 1..25: mol_type = other RNA
ttataggttatcaaaactgttgtca

SEQ ID NO: 5709 - RNA, 25 nt, synthetic construct
  misc_feature 1..25: note = Description of Artificial Sequence: Syntheticoligonucleotide
  source 1..25: mol_type = other RNA
ataggttatcaaaactgttgtcacc

SEQ ID NO: 5710 - RNA, 25 nt, synthetic construct
  misc_feature 1..25: note = Description of Artificial Sequence: Syntheticoligonucleotide
  source 1..25: mol_type = other RNA
ttttgtcctaatatatacatagaaa

SEQ ID NO: 5711 - RNA, 25 nt, synthetic construct
  misc_feature 1..25: note = Description of Artificial Sequence: Syntheticoligonucleotide
  source 1..25: mol_type = other RNA
tttgtcctaatatatacatagaaac

SEQ ID NO: 5712 - RNA, 25 nt, synthetic construct
  misc_feature 1..25: note = Description of Artificial Sequence: Syntheticoligonucleotide
  source 1..25: mol_type = other RNA
ttgtcctaatatatacatagaaact

SEQ ID NO: 5713 - RNA, 25 nt, synthetic construct
  misc_feature 1..25: note = Description of Artificial Sequence: Syntheticoligonucleotide
  source 1..25: mol_type = other RNA
taatatatacatagaaactttgtgg

SEQ ID NO: 5714 - RNA, 25 nt, synthetic construct
  misc_feature 1..25: note = Description of Artificial Sequence: Syntheticoligonucleotide
  source 1..25: mol_type = other RNA
tatacatagaaactttgtggggcat

SEQ ID NO: 5715 - RNA, 25 nt, synthetic construct
  misc_feature 1..25: note = Description of Artificial Sequence: Syntheticoligonucleotide
  source 1..25: mol_type = other RNA
caagttcatctcatttgtattccat

SEQ ID NO: 5716 - RNA, 25 nt, synthetic construct
  misc_feature 1..25: note = Description of Artificial Sequence: Syntheticoligonucleotide
  source 1..25: mol_type = other RNA
catttgtattccattgatttttttt

SEQ ID NO: 5717 - RNA, 25 nt, synthetic construct
  misc_feature 1..25: note = Description of Artificial Sequence: Syntheticoligonucleotide
  source 1..25: mol_type = other RNA
atttgtattccattgattttttttt

SEQ ID NO: 5718 - RNA, 25 nt, synthetic construct
  misc_feature 1..25: note = Description of Artificial Sequence: Syntheticoligonucleotide
  source 1..25: mol_type = other RNA
tttgtattccattgatttttttttt

SEQ ID NO: 5719 - RNA, 25 nt, synthetic construct
  misc_feature 1..25: note = Description of Artificial Sequence: Syntheticoligonucleotide
  source 1..25: mol_type = other RNA
ttgtattccattgattttttttttc

SEQ ID NO: 5720 - RNA, 25 nt, synthetic construct
  misc_feature 1..25: note = Description of Artificial Sequence: Syntheticoligonucleotide
  source 1..25: mol_type = other RNA
tgtattccattgattttttttttct

SEQ ID NO: 5721 - RNA, 25 nt, synthetic construct
  misc_feature 1..25: note = Description of Artificial Sequence: Syntheticoligonucleotide
  source 1..25: mol_type = other RNA
gtattccattgattttttttttctt

SEQ ID NO: 5722 - RNA, 25 nt, synthetic construct
  misc_feature 1..25: note = Description of Artificial Sequence: Syntheticoligonucleotide
  source 1..25: mol_type = other RNA
tattccattgattttttttttcttc

SEQ ID NO: 5723 - RNA, 25 nt, synthetic construct
  misc_feature 1..25: note = Description of Artificial Sequence: Syntheticoligonucleotide
  source 1..25: mol_type = other RNA
ttgattttttttttcttctaaacat

SEQ ID NO: 5724 - RNA, 25 nt, synthetic construct
  misc_feature 1..25: note = Description of Artificial Sequence: Syntheticoligonucleotide
  source 1..25: mol_type = other RNA
tgattttttttttcttctaaacatt

SEQ ID NO: 5725 - RNA, 25 nt, synthetic construct
  misc_feature 1..25: note = Description of Artificial Sequence: Syntheticoligonucleotide
  source 1..25: mol_type = other RNA
tttttttttcttctaaacatttttt

SEQ ID NO: 5726 - RNA, 25 nt, synthetic construct
  misc_feature 1..25: note = Description of Artificial Sequence: Syntheticoligonucleotide
  source 1..25: mol_type = other RNA
ttttttttcttctaaacattttttc

SEQ ID NO: 5727 - RNA, 25 nt, synthetic construct
  misc_feature 1..25: note = Description of Artificial Sequence: Syntheticoligonucleotide
  source 1..25: mol_type = other RNA
tttttttcttctaaacattttttct

SEQ ID NO: 5728 - RNA, 25 nt, synthetic construct
  misc_feature 1..25: note = Description of Artificial Sequence: Syntheticoligonucleotide
  source 1..25: mol_type = other RNA
ttttttcttctaaacattttttctt

SEQ ID NO: 5729 - RNA, 25 nt, synthetic construct
  misc_feature 1..25: note = Description of Artificial Sequence: Syntheticoligonucleotide
  source 1..25: mol_type = other RNA
tttttcttctaaacattttttcttc

SEQ ID NO: 5730 - RNA, 25 nt, synthetic construct
  misc_feature 1..25: note = Description of Artificial Sequence: Syntheticoligonucleotide
  source 1..25: mol_type = other RNA
cattttttcttcaaacagtatataa

SEQ ID NO: 5731 - RNA, 25 nt, synthetic construct
  misc_feature 1..25: note = Description of Artificial Sequence: Syntheticoligonucleotide
  source 1..25: mol_type = other RNA
attttttcttcaaacagtatataac

SEQ ID NO: 5732 - RNA, 25 nt, synthetic construct
  misc_feature 1..25: note = Description of Artificial Sequence: Syntheticoligonucleotide
  source 1..25: mol_type = other RNA
ttttttcttcaaacagtatataact

SEQ ID NO: 5733 - RNA, 25 nt, synthetic construct
  misc_feature 1..25: note = Description of Artificial Sequence: Syntheticoligonucleotide
  source 1..25: mol_type = other RNA
tttttcttcaaacagtatataactt

SEQ ID NO: 5734 - RNA, 25 nt, synthetic construct
  misc_feature 1..25: note = Description of Artificial Sequence: Syntheticoligonucleotide
  source 1..25: mol_type = other RNA
ttttcttcaaacagtatataacttt

SEQ ID NO: 5735 - RNA, 25 nt, synthetic construct
  misc_feature 1..25: note = Description of Artificial Sequence: Syntheticoligonucleotide
  source 1..25: mol_type = other RNA
caaacagtatataactttttttagg

SEQ ID NO: 5736 - RNA, 25 nt, synthetic construct
  misc_feature 1..25: note = Description of Artificial Sequence: Syntheticoligonucleotide
  source 1..25: mol_type = other RNA
agtatataactttttttaggggatt

SEQ ID NO: 5737 - RNA, 25 nt, synthetic construct
  misc_feature 1..25: note = Description of Artificial Sequence: Syntheticoligonucleotide
  source 1..25: mol_type = other RNA
gtatataactttttttaggggattt

SEQ ID NO: 5738 - RNA, 25 nt, synthetic construct
  misc_feature 1..25: note = Description of Artificial Sequence: Syntheticoligonucleotide
  source 1..25: mol_type = other RNA
tatataactttttttaggggatttt

SEQ ID NO: 5739 - RNA, 25 nt, synthetic construct
  misc_feature 1..25: note = Description of Artificial Sequence: Syntheticoligonucleotide
  source 1..25: mol_type = other RNA
atataactttttttaggggattttt

SEQ ID NO: 5740 - RNA, 25 nt, synthetic construct
  misc_feature 1..25: note = Description of Artificial Sequence: Syntheticoligonucleotide
  source 1..25: mol_type = other RNA
ctttttttaggggatttttttttag

SEQ ID NO: 5741 - RNA, 25 nt, synthetic construct
  misc_feature 1..25: note = Description of Artificial Sequence: Syntheticoligonucleotide
  source 1..25: mol_type = other RNA
tttttttaggggatttttttttaga

SEQ ID NO: 5742 - RNA, 25 nt, synthetic construct
  misc_feature 1..25: note = Description of Artificial Sequence: Syntheticoligonucleotide
  source 1..25: mol_type = other RNA
gatttttttttagacagcaaaaact

SEQ ID NO: 5743 - RNA, 25 nt, synthetic construct
  misc_feature 1..25: note = Description of Artificial Sequence: Syntheticoligonucleotide
  source 1..25: mol_type = other RNA
atttttttttagacagcaaaaacta

SEQ ID NO: 5744 - RNA, 25 nt, synthetic construct
  misc_feature 1..25: note = Description of Artificial Sequence: Syntheticoligonucleotide
  source 1..25: mol_type = other RNA
tttttttttagacagcaaaaactat

SEQ ID NO: 5745 - RNA, 25 nt, synthetic construct
  misc_feature 1..25: note = Description of Artificial Sequence: Syntheticoligonucleotide
  source 1..25: mol_type = other RNA
aagatttccatttgtcaaaaagtaa

SEQ ID NO: 5746 - RNA, 25 nt, synthetic construct
  misc_feature 1..25: note = Description of Artificial Sequence: Syntheticoligonucleotide
  source 1..25: mol_type = other RNA
agatttccatttgtcaaaaagtaat

SEQ ID NO: 5747 - RNA, 25 nt, synthetic construct
  misc_feature 1..25: note = Description of Artificial Sequence: Syntheticoligonucleotide
  source 1..25: mol_type = other RNA
gatttccatttgtcaaaaagtaatg

SEQ ID NO: 5748 - RNA, 25 nt, synthetic construct
  misc_feature 1..25: note = Description of Artificial Sequence: Syntheticoligonucleotide
  source 1..25: mol_type = other RNA
atttccatttgtcaaaaagtaatga

SEQ ID NO: 5749 - RNA, 25 nt, synthetic construct
  misc_feature 1..25: note = Description of Artificial Sequence: Syntheticoligonucleotide
  source 1..25: mol_type = other RNA
catttgtcaaaaagtaatgatttct

SEQ ID NO: 5750 - RNA, 25 nt, synthetic construct
  misc_feature 1..25: note = Description of Artificial Sequence: Syntheticoligonucleotide
  source 1..25: mol_type = other RNA
atttgtcaaaaagtaatgatttctt

SEQ ID NO: 5751 - RNA, 25 nt, synthetic construct
  misc_feature 1..25: note = Description of Artificial Sequence: Syntheticoligonucleotide
  source 1..25: mol_type = other RNA
tttgtcaaaaagtaatgatttcttg

SEQ ID NO: 5752 - RNA, 25 nt, synthetic construct
  misc_feature 1..25: note = Description of Artificial Sequence: Syntheticoligonucleotide
  source 1..25: mol_type = other RNA
caaaaagtaatgatttcttgataat

SEQ ID NO: 5753 - RNA, 25 nt, synthetic construct
  misc_feature 1..25: note = Description of Artificial Sequence: Syntheticoligonucleotide
  source 1..25: mol_type = other RNA
aaaaagtaatgatttcttgataatt

SEQ ID NO: 5754 - RNA, 25 nt, synthetic construct
  misc_feature 1..25: note = Description of Artificial Sequence: Syntheticoligonucleotide
  source 1..25: mol_type = other RNA
aaaagtaatgatttcttgataattg

SEQ ID NO: 5755 - RNA, 25 nt, synthetic construct
  misc_feature 1..25: note = Description of Artificial Sequence: Syntheticoligonucleotide
  source 1..25: mol_type = other RNA
aaagtaatgatttcttgataattgt

SEQ ID NO: 5756 - RNA, 25 nt, synthetic construct
  misc_feature 1..25: note = Description of Artificial Sequence: Syntheticoligonucleotide
  source 1..25: mol_type = other RNA
agtaatgatttcttgataattgtgt

SEQ ID NO: 5757 - RNA, 25 nt, synthetic construct
  misc_feature 1..25: note = Description of Artificial Sequence: Syntheticoligonucleotide
  source 1..25: mol_type = other RNA
taatgatttcttgataattgtgtag

SEQ ID NO: 5758 - RNA, 25 nt, synthetic construct
  misc_feature 1..25: note = Description of Artificial Sequence: Syntheticoligonucleotide
  source 1..25: mol_type = other RNA
aatgatttcttgataattgtgtagt

SEQ ID NO: 5759 - RNA, 25 nt, synthetic construct
  misc_feature 1..25: note = Description of Artificial Sequence: Syntheticoligonucleotide
  source 1..25: mol_type = other RNA
tgatttcttgataattgtgtagtaa

SEQ ID NO: 5760 - RNA, 25 nt, synthetic construct
  misc_feature 1..25: note = Description of Artificial Sequence: Syntheticoligonucleotide
  source 1..25: mol_type = other RNA
gatttcttgataattgtgtagtaat

SEQ ID NO: 5761 - RNA, 25 nt, synthetic construct
  misc_feature 1..25: note = Description of Artificial Sequence: Syntheticoligonucleotide
  source 1..25: mol_type = other RNA
cttgataattgtgtagtaatgtttt

SEQ ID NO: 5762 - RNA, 25 nt, synthetic construct
  misc_feature 1..25: note = Description of Artificial Sequence: Syntheticoligonucleotide
  source 1..25: mol_type = other RNA
ttgataattgtgtagtaatgttttt

SEQ ID NO: 5763 - RNA, 25 nt, synthetic construct
  misc_feature 1..25: note = Description of Artificial Sequence: Syntheticoligonucleotide
  source 1..25: mol_type = other RNA
tgataattgtgtagtaatgtttttt

SEQ ID NO: 5764 - RNA, 25 nt, synthetic construct
  misc_feature 1..25: note = Description of Artificial Sequence: Syntheticoligonucleotide
  source 1..25: mol_type = other RNA
ataattgtgtagtaatgttttttag

SEQ ID NO: 5765 - RNA, 25 nt, synthetic construct
  misc_feature 1..25: note = Description of Artificial Sequence: Syntheticoligonucleotide
  source 1..25: mol_type = other RNA
attgtgtagtaatgttttttagaac

SEQ ID NO: 5766 - RNA, 25 nt, synthetic construct
  misc_feature 1..25: note = Description of Artificial Sequence: Syntheticoligonucleotide
  source 1..25: mol_type = other RNA
tgtgtagtaatgttttttagaaccc

SEQ ID NO: 5767 - RNA, 25 nt, synthetic construct
  misc_feature 1..25: note = Description of Artificial Sequence: Syntheticoligonucleotide
  source 1..25: mol_type = other RNA
gtgtagtaatgttttttagaaccca

SEQ ID NO: 5768 - RNA, 25 nt, synthetic construct
  misc_feature 1..25: note = Description of Artificial Sequence: Syntheticoligonucleotide
  source 1..25: mol_type = other RNA
ttaaagctgaatttatatttagtaa

SEQ ID NO: 5769 - RNA, 25 nt, synthetic construct
  misc_feature 1..25: note = Description of Artificial Sequence: Syntheticoligonucleotide
  source 1..25: mol_type = other RNA
aaagctgaatttatatttagtaact

SEQ ID NO: 5770 - RNA, 25 nt, synthetic construct
  misc_feature 1..25: note = Description of Artificial Sequence: Syntheticoligonucleotide
  source 1..25: mol_type = other RNA
tttatatttagtaacttctgtgtta

SEQ ID NO: 5771 - RNA, 25 nt, synthetic construct
  misc_feature 1..25: note = Description of Artificial Sequence: Syntheticoligonucleotide
  source 1..25: mol_type = other RNA
ttatatttagtaacttctgtgttaa

SEQ ID NO: 5772 - RNA, 25 nt, synthetic construct
  misc_feature 1..25: note = Description of Artificial Sequence: Syntheticoligonucleotide
  source 1..25: mol_type = other RNA
tatatttagtaacttctgtgttaat

SEQ ID NO: 5773 - RNA, 25 nt, synthetic construct
  misc_feature 1..25: note = Description of Artificial Sequence: Syntheticoligonucleotide
  source 1..25: mol_type = other RNA
ttagtaacttctgtgttaatactgg

SEQ ID NO: 5774 - RNA, 25 nt, synthetic construct
  misc_feature 1..25: note = Description of Artificial Sequence: Syntheticoligonucleotide
  source 1..25: mol_type = other RNA
tgaatagctgtcataaaatgaaact

SEQ ID NO: 5775 - RNA, 25 nt, synthetic construct
  misc_feature 1..25: note = Description of Artificial Sequence: Syntheticoligonucleotide
  source 1..25: mol_type = other RNA
gaatagctgtcataaaatgaaactt

SEQ ID NO: 5776 - RNA, 25 nt, synthetic construct
  misc_feature 1..25: note = Description of Artificial Sequence: Syntheticoligonucleotide
  source 1..25: mol_type = other RNA
aaatgaaactttctttctaaagaaa

SEQ ID NO: 5777 - RNA, 25 nt, synthetic construct
  misc_feature 1..25: note = Description of Artificial Sequence: Syntheticoligonucleotide
  source 1..25: mol_type = other RNA
aatgaaactttctttctaaagaaag

SEQ ID NO: 5778 - RNA, 25 nt, synthetic construct
  misc_feature 1..25: note = Description of Artificial Sequence: Syntheticoligonucleotide
  source 1..25: mol_type = other RNA
atgaaactttctttctaaagaaaga

SEQ ID NO: 5779 - RNA, 25 nt, synthetic construct
  misc_feature 1..25: note = Description of Artificial Sequence: Syntheticoligonucleotide
  source 1..25: mol_type = other RNA
gaaactttctttctaaagaaagata

SEQ ID NO: 5780 - RNA, 25 nt, synthetic construct
  misc_feature 1..25: note = Description of Artificial Sequence: Syntheticoligonucleotide
  source 1..25: mol_type = other RNA
ctttctttctaaagaaagatactca

SEQ ID NO: 5781 - RNA, 25 nt, synthetic construct
  misc_feature 1..25: note = Description of Artificial Sequence: Syntheticoligonucleotide
  source 1..25: mol_type = other RNA
catgagttcttgaagaatagtcata

SEQ ID NO: 5782 - RNA, 25 nt, synthetic construct
  misc_feature 1..25: note = Description of Artificial Sequence: Syntheticoligonucleotide
  source 1..25: mol_type = other RNA
ttgaagaatagtcataactagatta

SEQ ID NO: 5783 - RNA, 25 nt, synthetic construct
  misc_feature 1..25: note = Description of Artificial Sequence: Syntheticoligonucleotide
  source 1..25: mol_type = other RNA
tgaagaatagtcataactagattaa

SEQ ID NO: 5784 - RNA, 25 nt, synthetic construct
  misc_feature 1..25: note = Description of Artificial Sequence: Syntheticoligonucleotide
  source 1..25: mol_type = other RNA
gaagaatagtcataactagattaag

SEQ ID NO: 5785 - RNA, 25 nt, synthetic construct
  misc_feature 1..25: note = Description of Artificial Sequence: Syntheticoligonucleotide
  source 1..25: mol_type = other RNA
gaatagtcataactagattaagatc

SEQ ID NO: 5786 - RNA, 25 nt, synthetic construct
  misc_feature 1..25: note = Description of Artificial Sequence: Syntheticoligonucleotide
  source 1..25: mol_type = other RNA
aatagtcataactagattaagatct

SEQ ID NO: 5787 - RNA, 25 nt, synthetic construct
  misc_feature 1..25: note = Description of Artificial Sequence: Syntheticoligonucleotide
  source 1..25: mol_type = other RNA
atagtcataactagattaagatctg

SEQ ID NO: 5788 - RNA, 25 nt, synthetic construct
  misc_feature 1..25: note = Description of Artificial Sequence: Syntheticoligonucleotide
  source 1..25: mol_type = other RNA
tagtcataactagattaagatctgt

SEQ ID NO: 5789 - RNA, 25 nt, synthetic construct
  misc_feature 1..25: note = Description of Artificial Sequence: Syntheticoligonucleotide
  source 1..25: mol_type = other RNA
cataactagattaagatctgtgttt

SEQ ID NO: 5790 - RNA, 25 nt, synthetic construct
  misc_feature 1..25: note = Description of Artificial Sequence: Syntheticoligonucleotide
  source 1..25: mol_type = other RNA
tagattaagatctgtgttttagttt

SEQ ID NO: 5791 - RNA, 25 nt, synthetic construct
  misc_feature 1..25: note = Description of Artificial Sequence: Syntheticoligonucleotide
  source 1..25: mol_type = other RNA
gattaagatctgtgttttagtttaa

SEQ ID NO: 5792 - RNA, 25 nt, synthetic construct
  misc_feature 1..25: note = Description of Artificial Sequence: Syntheticoligonucleotide
  source 1..25: mol_type = other RNA
attaagatctgtgttttagtttaat

SEQ ID NO: 5793 - RNA, 25 nt, synthetic construct
  misc_feature 1..25: note = Description of Artificial Sequence: Syntheticoligonucleotide
  source 1..25: mol_type = other RNA
taagatctgtgttttagtttaatag

SEQ ID NO: 5794 - RNA, 25 nt, synthetic construct
  misc_feature 1..25: note = Description of Artificial Sequence: Syntheticoligonucleotide
  source 1..25: mol_type = other RNA
tgtgttttagtttaatagtttgaag

SEQ ID NO: 5795 - RNA, 25 nt, synthetic construct
  misc_feature 1..25: note = Description of Artificial Sequence: Syntheticoligonucleotide
  source 1..25: mol_type = other RNA
gtgttttagtttaatagtttgaagt

SEQ ID NO: 5796 - RNA, 25 nt, synthetic construct
  misc_feature 1..25: note = Description of Artificial Sequence: Syntheticoligonucleotide
  source 1..25: mol_type = other RNA
gttttagtttaatagtttgaagtgc

SEQ ID NO: 5797 - RNA, 25 nt, synthetic construct
  misc_feature 1..25: note = Description of Artificial Sequence: Syntheticoligonucleotide
  source 1..25: mol_type = other RNA
tttagtttaatagtttgaagtgcct

SEQ ID NO: 5798 - RNA, 25 nt, synthetic construct
  misc_feature 1..25: note = Description of Artificial Sequence: Syntheticoligonucleotide
  source 1..25: mol_type = other RNA
ttagtttaatagtttgaagtgcctg

SEQ ID NO: 5799 - RNA, 25 nt, synthetic construct
  misc_feature 1..25: note = Description of Artificial Sequence: Syntheticoligonucleotide
  source 1..25: mol_type = other RNA
ttgggataatgataggtaatttaga

SEQ ID NO: 5800 - RNA, 25 nt, synthetic construct
  misc_feature 1..25: note = Description of Artificial Sequence: Syntheticoligonucleotide
  source 1..25: mol_type = other RNA
gggataatgataggtaatttagatg

SEQ ID NO: 5801 - RNA, 25 nt, synthetic construct
  misc_feature 1..25: note = Description of Artificial Sequence: Syntheticoligonucleotide
  source 1..25: mol_type = other RNA
ataatgataggtaatttagatgaat

SEQ ID NO: 5802 - RNA, 25 nt, synthetic construct
  misc_feature 1..25: note = Description of Artificial Sequence: Syntheticoligonucleotide
  source 1..25: mol_type = other RNA
taatgataggtaatttagatgaatt

SEQ ID NO: 5803 - RNA, 25 nt, synthetic construct
  misc_feature 1..25: note = Description of Artificial Sequence: Syntheticoligonucleotide
  source 1..25: mol_type = other RNA
tgataggtaatttagatgaatttag

SEQ ID NO: 5804 - RNA, 25 nt, synthetic construct
  misc_feature 1..25: note = Description of Artificial Sequence: Syntheticoligonucleotide
  source 1..25: mol_type = other RNA
gataggtaatttagatgaatttagg

SEQ ID NO: 5805 - RNA, 25 nt, synthetic construct
  misc_feature 1..25: note = Description of Artificial Sequence: Syntheticoligonucleotide
  source 1..25: mol_type = other RNA
gtaatttagatgaatttaggggaaa

SEQ ID NO: 5806 - RNA, 25 nt, synthetic construct
  misc_feature 1..25: note = Description of Artificial Sequence: Syntheticoligonucleotide
  source 1..25: mol_type = other RNA
aatttagatgaatttaggggaaaaa

SEQ ID NO: 5807 - RNA, 25 nt, synthetic construct
  misc_feature 1..25: note = Description of Artificial Sequence: Syntheticoligonucleotide
  source 1..25: mol_type = other RNA
atgaatttaggggaaaaaaaagtta

SEQ ID NO: 5808 - RNA, 25 nt, synthetic construct
  misc_feature 1..25: note = Description of Artificial Sequence: Syntheticoligonucleotide
  source 1..25: mol_type = other RNA
tgaatttaggggaaaaaaaagttat

SEQ ID NO: 5809 - RNA, 25 nt, synthetic construct
  misc_feature 1..25: note = Description of Artificial Sequence: Syntheticoligonucleotide
  source 1..25: mol_type = other RNA
gaaaaaaaagttatctgcagatatg

SEQ ID NO: 5810 - RNA, 25 nt, synthetic construct
  misc_feature 1..25: note = Description of Artificial Sequence: Syntheticoligonucleotide
  source 1..25: mol_type = other RNA
aaaaaaaagttatctgcagatatgt

SEQ ID NO: 5811 - RNA, 25 nt, synthetic construct
  misc_feature 1..25: note = Description of Artificial Sequence: Syntheticoligonucleotide
  source 1..25: mol_type = other RNA
aaagttatctgcagatatgttgagg

SEQ ID NO: 5812 - RNA, 25 nt, synthetic construct
  misc_feature 1..25: note = Description of Artificial Sequence: Syntheticoligonucleotide
  source 1..25: mol_type = other RNA
cttgtgttttcatgttgaaaatact

SEQ ID NO: 5813 - RNA, 25 nt, synthetic construct
  misc_feature 1..25: note = Description of Artificial Sequence: Syntheticoligonucleotide
  source 1..25: mol_type = other RNA
ttgtgttttcatgttgaaaatactt

SEQ ID NO: 5814 - RNA, 25 nt, synthetic construct
  misc_feature 1..25: note = Description of Artificial Sequence: Syntheticoligonucleotide
  source 1..25: mol_type = other RNA
tgtgttttcatgttgaaaatacttt

SEQ ID NO: 5815 - RNA, 25 nt, synthetic construct
  misc_feature 1..25: note = Description of Artificial Sequence: Syntheticoligonucleotide
  source 1..25: mol_type = other RNA
tgttgaaaatacttttgcatttttc

SEQ ID NO: 5816 - RNA, 25 nt, synthetic construct
  misc_feature 1..25: note = Description of Artificial Sequence: Syntheticoligonucleotide
  source 1..25: mol_type = other RNA
gttgaaaatacttttgcatttttcc

SEQ ID NO: 5817 - RNA, 25 nt, synthetic construct
  misc_feature 1..25: note = Description of Artificial Sequence: Syntheticoligonucleotide
  source 1..25: mol_type = other RNA
ttgaaaatacttttgcatttttcct

SEQ ID NO: 5818 - RNA, 25 nt, synthetic construct
  misc_feature 1..25: note = Description of Artificial Sequence: Syntheticoligonucleotide
  source 1..25: mol_type = other RNA
tgaaaatacttttgcatttttcctt

SEQ ID NO: 5819 - RNA, 25 nt, synthetic construct
  misc_feature 1..25: note = Description of Artificial Sequence: Syntheticoligonucleotide
  source 1..25: mol_type = other RNA
tttgcatttttcctttgagtgccaa

SEQ ID NO: 5820 - RNA, 25 nt, synthetic construct
  misc_feature 1..25: note = Description of Artificial Sequence: Syntheticoligonucleotide
  source 1..25: mol_type = other RNA
agtgccaatttcttactagtactat

SEQ ID NO: 5821 - RNA, 25 nt, synthetic construct
  misc_feature 1..25: note = Description of Artificial Sequence: Syntheticoligonucleotide
  source 1..25: mol_type = other RNA
caatttcttactagtactatttctt

SEQ ID NO: 5822 - RNA, 25 nt, synthetic construct
  misc_feature 1..25: note = Description of Artificial Sequence: Syntheticoligonucleotide
  source 1..25: mol_type = other RNA
aatttcttactagtactatttctta

SEQ ID NO: 5823 - RNA, 25 nt, synthetic construct
  misc_feature 1..25: note = Description of Artificial Sequence: Syntheticoligonucleotide
  source 1..25: mol_type = other RNA
ctagtactatttcttaatgtaacat

SEQ ID NO: 5824 - RNA, 25 nt, synthetic construct
  misc_feature 1..25: note = Description of Artificial Sequence: Syntheticoligonucleotide
  source 1..25: mol_type = other RNA
tagtactatttcttaatgtaacatg

SEQ ID NO: 5825 - RNA, 25 nt, synthetic construct
  misc_feature 1..25: note = Description of Artificial Sequence: Syntheticoligonucleotide
  source 1..25: mol_type = other RNA
ctatttcttaatgtaacatgtttac

SEQ ID NO: 5826 - RNA, 25 nt, synthetic construct
  misc_feature 1..25: note = Description of Artificial Sequence: Syntheticoligonucleotide
  source 1..25: mol_type = other RNA
tatttcttaatgtaacatgtttacc

SEQ ID NO: 5827 - RNA, 25 nt, synthetic construct
  misc_feature 1..25: note = Description of Artificial Sequence: Syntheticoligonucleotide
  source 1..25: mol_type = other RNA
atttcttaatgtaacatgtttacct

SEQ ID NO: 5828 - RNA, 25 nt, synthetic construct
  misc_feature 1..25: note = Description of Artificial Sequence: Syntheticoligonucleotide
  source 1..25: mol_type = other RNA
aatgtaacatgtttacctggaatgt

SEQ ID NO: 5829 - RNA, 25 nt, synthetic construct
  misc_feature 1..25: note = Description of Artificial Sequence: Syntheticoligonucleotide
  source 1..25: mol_type = other RNA
tggaatgtattttaactatttttgt

SEQ ID NO: 5830 - RNA, 25 nt, synthetic construct
  misc_feature 1..25: note = Description of Artificial Sequence: Syntheticoligonucleotide
  source 1..25: mol_type = other RNA
gaatgtattttaactatttttgtat

SEQ ID NO: 5831 - RNA, 25 nt, synthetic construct
  misc_feature 1..25: note = Description of Artificial Sequence: Syntheticoligonucleotide
  source 1..25: mol_type = other RNA
aatgtattttaactatttttgtata

SEQ ID NO: 5832 - RNA, 25 nt, synthetic construct
  misc_feature 1..25: note = Description of Artificial Sequence: Syntheticoligonucleotide
  source 1..25: mol_type = other RNA
atgtattttaactatttttgtatag

SEQ ID NO: 5833 - RNA, 25 nt, synthetic construct
  misc_feature 1..25: note = Description of Artificial Sequence: Syntheticoligonucleotide
  source 1..25: mol_type = other RNA
tgtattttaactatttttgtatagt

SEQ ID NO: 5834 - RNA, 25 nt, synthetic construct
  misc_feature 1..25: note = Description of Artificial Sequence: Syntheticoligonucleotide
  source 1..25: mol_type = other RNA
tattttaactatttttgtatagtgt

SEQ ID NO: 5835 - RNA, 25 nt, synthetic construct
  misc_feature 1..25: note = Description of Artificial Sequence: Syntheticoligonucleotide
  source 1..25: mol_type = other RNA
ttttaactatttttgtatagtgtaa

SEQ ID NO: 5836 - RNA, 25 nt, synthetic construct
  misc_feature 1..25: note = Description of Artificial Sequence: Syntheticoligonucleotide
  source 1..25: mol_type = other RNA
tttaactatttttgtatagtgtaaa

SEQ ID NO: 5837 - RNA, 25 nt, synthetic construct
  misc_feature 1..25: note = Description of Artificial Sequence: Syntheticoligonucleotide
  source 1..25: mol_type = other RNA
ttaactatttttgtatagtgtaaac

SEQ ID NO: 5838 - RNA, 25 nt, synthetic construct
  misc_feature 1..25: note = Description of Artificial Sequence: Syntheticoligonucleotide
  source 1..25: mol_type = other RNA
tttttgtatagtgtaaactgaaaca

SEQ ID NO: 5839 - RNA, 25 nt, synthetic construct
  misc_feature 1..25: note = Description of Artificial Sequence: Syntheticoligonucleotide
  source 1..25: mol_type = other RNA
ttttgtatagtgtaaactgaaacat

SEQ ID NO: 5840 - RNA, 25 nt, synthetic construct
  misc_feature 1..25: note = Description of Artificial Sequence: Syntheticoligonucleotide
  source 1..25: mol_type = other RNA
tttgtatagtgtaaactgaaacatg

SEQ ID NO: 5841 - RNA, 25 nt, synthetic construct
  misc_feature 1..25: note = Description of Artificial Sequence: Syntheticoligonucleotide
  source 1..25: mol_type = other RNA
ctgaaacatgcacattttgtacatt

SEQ ID NO: 5842 - RNA, 25 nt, synthetic construct
  misc_feature 1..25: note = Description of Artificial Sequence: Syntheticoligonucleotide
  source 1..25: mol_type = other RNA
catgcacattttgtacattgtgctt

SEQ ID NO: 5843 - RNA, 25 nt, synthetic construct
  misc_feature 1..25: note = Description of Artificial Sequence: Syntheticoligonucleotide
  source 1..25: mol_type = other RNA
cagttgttttccatcatttggttgc

SEQ ID NO: 5844 - RNA, 25 nt, synthetic construct
  misc_feature 1..25: note = Description of Artificial Sequence: Syntheticoligonucleotide
  source 1..25: mol_type = other RNA
gttgttttccatcatttggttgcgc

SEQ ID NO: 5845 - RNA, 25 nt, synthetic construct
  misc_feature 1..25: note = Description of Artificial Sequence: Syntheticoligonucleotide
  source 1..25: mol_type = other RNA
gttggtcatatcaaacattaaaaat

SEQ ID NO: 5846 - RNA, 25 nt, synthetic construct
  misc_feature 1..25: note = Description of Artificial Sequence: Syntheticoligonucleotide
  source 1..25: mol_type = other RNA
ttggtcatatcaaacattaaaaatg

SEQ ID NO: 5847 - RNA, 25 nt, synthetic construct
  misc_feature 1..25: note = Description of Artificial Sequence: Syntheticoligonucleotide
  source 1..25: mol_type = other RNA
tggtcatatcaaacattaaaaatga

SEQ ID NO: 5848 - RNA, 25 nt, synthetic construct
  misc_feature 1..25: note = Description of Artificial Sequence: Syntheticoligonucleotide
  source 1..25: mol_type = other RNA
catatcaaacattaaaaatgaccac

SEQ ID NO: 5849 - RNA, 25 nt, synthetic construct
  misc_feature 1..25: note = Description of Artificial Sequence: Syntheticoligonucleotide
  source 1..25: mol_type = other RNA
aatgaccactcttttaattgaaatt

SEQ ID NO: 5850 - RNA, 25 nt, synthetic construct
  misc_feature 1..25: note = Description of Artificial Sequence: Syntheticoligonucleotide
  source 1..25: mol_type = other RNA
atgaccactcttttaattgaaatta

SEQ ID NO: 5851 - RNA, 25 nt, synthetic construct
  misc_feature 1..25: note = Description of Artificial Sequence: Syntheticoligonucleotide
  source 1..25: mol_type = other RNA
cttttaattgaaattaacttttaaa

SEQ ID NO: 5852 - RNA, 25 nt, synthetic construct
  misc_feature 1..25: note = Description of Artificial Sequence: Syntheticoligonucleotide
  source 1..25: mol_type = other RNA
ttttaattgaaattaacttttaaat

SEQ ID NO: 5853 - RNA, 25 nt, synthetic construct
  misc_feature 1..25: note = Description of Artificial Sequence: Syntheticoligonucleotide
  source 1..25: mol_type = other RNA
ttaattgaaattaacttttaaatgt

SEQ ID NO: 5854 - RNA, 25 nt, synthetic construct
  misc_feature 1..25: note = Description of Artificial Sequence: Syntheticoligonucleotide
  source 1..25: mol_type = other RNA
aattgaaattaacttttaaatgttt

SEQ ID NO: 5855 - RNA, 25 nt, synthetic construct
  misc_feature 1..25: note = Description of Artificial Sequence: Syntheticoligonucleotide
  source 1..25: mol_type = other RNA
attgaaattaacttttaaatgttta

SEQ ID NO: 5856 - RNA, 25 nt, synthetic construct
  misc_feature 1..25: note = Description of Artificial Sequence: Syntheticoligonucleotide
  source 1..25: mol_type = other RNA
ttgaaattaacttttaaatgtttat

SEQ ID NO: 5857 - RNA, 25 nt, synthetic construct
  misc_feature 1..25: note = Description of Artificial Sequence: Syntheticoligonucleotide
  source 1..25: mol_type = other RNA
tgaaattaacttttaaatgtttata

SEQ ID NO: 5858 - RNA, 25 nt, synthetic construct
  misc_feature 1..25: note = Description of Artificial Sequence: Syntheticoligonucleotide
  source 1..25: mol_type = other RNA
gaaattaacttttaaatgtttatag

SEQ ID NO: 5859 - RNA, 25 nt, synthetic construct
  misc_feature 1..25: note = Description of Artificial Sequence: Syntheticoligonucleotide
  source 1..25: mol_type = other RNA
aaattaacttttaaatgtttatagg

SEQ ID NO: 5860 - RNA, 25 nt, synthetic construct
  misc_feature 1..25: note = Description of Artificial Sequence: Syntheticoligonucleotide
  source 1..25: mol_type = other RNA
ttaacttttaaatgtttataggagt

SEQ ID NO: 5861 - RNA, 25 nt, synthetic construct
  misc_feature 1..25: note = Description of Artificial Sequence: Syntheticoligonucleotide
  source 1..25: mol_type = other RNA
cttttaaatgtttataggagtatgt

SEQ ID NO: 5862 - RNA, 25 nt, synthetic construct
  misc_feature 1..25: note = Description of Artificial Sequence: Syntheticoligonucleotide
  source 1..25: mol_type = other RNA
taaatgtttataggagtatgtgctg

SEQ ID NO: 5863 - RNA, 25 nt, synthetic construct
  misc_feature 1..25: note = Description of Artificial Sequence: Syntheticoligonucleotide
  source 1..25: mol_type = other RNA
aaatgtttataggagtatgtgctgt

SEQ ID NO: 5864 - RNA, 25 nt, synthetic construct
  misc_feature 1..25: note = Description of Artificial Sequence: Syntheticoligonucleotide
  source 1..25: mol_type = other RNA
tgtgaagtgatctaaaatttgtaat

SEQ ID NO: 5865 - RNA, 25 nt, synthetic construct
  misc_feature 1..25: note = Description of Artificial Sequence: Syntheticoligonucleotide
  source 1..25: mol_type = other RNA
tgaagtgatctaaaatttgtaatat

SEQ ID NO: 5866 - RNA, 25 nt, synthetic construct
  misc_feature 1..25: note = Description of Artificial Sequence: Syntheticoligonucleotide
  source 1..25: mol_type = other RNA
gaagtgatctaaaatttgtaatatt

SEQ ID NO: 5867 - RNA, 25 nt, synthetic construct
  misc_feature 1..25: note = Description of Artificial Sequence: Syntheticoligonucleotide
  source 1..25: mol_type = other RNA
aagtgatctaaaatttgtaatattt

SEQ ID NO: 5868 - RNA, 25 nt, synthetic construct
  misc_feature 1..25: note = Description of Artificial Sequence: Syntheticoligonucleotide
  source 1..25: mol_type = other RNA
agtgatctaaaatttgtaatatttt

SEQ ID NO: 5869 - RNA, 25 nt, synthetic construct
  misc_feature 1..25: note = Description of Artificial Sequence: Syntheticoligonucleotide
  source 1..25: mol_type = other RNA
gtgatctaaaatttgtaatattttt

SEQ ID NO: 5870 - RNA, 25 nt, synthetic construct
  misc_feature 1..25: note = Description of Artificial Sequence: Syntheticoligonucleotide
  source 1..25: mol_type = other RNA
tgatctaaaatttgtaatatttttg

SEQ ID NO: 5871 - RNA, 25 nt, synthetic construct
  misc_feature 1..25: note = Description of Artificial Sequence: Syntheticoligonucleotide
  source 1..25: mol_type = other RNA
ctaaaatttgtaatatttttgtcat

SEQ ID NO: 5872 - RNA, 25 nt, synthetic construct
  misc_feature 1..25: note = Description of Artificial Sequence: Syntheticoligonucleotide
  source 1..25: mol_type = other RNA
taaaatttgtaatatttttgtcatg

SEQ ID NO: 5873 - RNA, 25 nt, synthetic construct
  misc_feature 1..25: note = Description of Artificial Sequence: Syntheticoligonucleotide
  source 1..25: mol_type = other RNA
atttgtaatatttttgtcatgaact

SEQ ID NO: 5874 - RNA, 25 nt, synthetic construct
  misc_feature 1..25: note = Description of Artificial Sequence: Syntheticoligonucleotide
  source 1..25: mol_type = other RNA
tttgtaatatttttgtcatgaactg

SEQ ID NO: 5875 - RNA, 25 nt, synthetic construct
  misc_feature 1..25: note = Description of Artificial Sequence: Syntheticoligonucleotide
  source 1..25: mol_type = other RNA
ttgtaatatttttgtcatgaactgt

SEQ ID NO: 5876 - RNA, 25 nt, synthetic construct
  misc_feature 1..25: note = Description of Artificial Sequence: Syntheticoligonucleotide
  source 1..25: mol_type = other RNA
aatatttttgtcatgaactgtacta

SEQ ID NO: 5877 - RNA, 25 nt, synthetic construct
  misc_feature 1..25: note = Description of Artificial Sequence: Syntheticoligonucleotide
  source 1..25: mol_type = other RNA
atatttttgtcatgaactgtactac

SEQ ID NO: 5878 - RNA, 25 nt, synthetic construct
  misc_feature 1..25: note = Description of Artificial Sequence: Syntheticoligonucleotide
  source 1..25: mol_type = other RNA
ctgtactactcctaattattgtaat

SEQ ID NO: 5879 - RNA, 25 nt, synthetic construct
  misc_feature 1..25: note = Description of Artificial Sequence: Syntheticoligonucleotide
  source 1..25: mol_type = other RNA
tgtactactcctaattattgtaatg

SEQ ID NO: 5880 - RNA, 25 nt, synthetic construct
  misc_feature 1..25: note = Description of Artificial Sequence: Syntheticoligonucleotide
  source 1..25: mol_type = other RNA
ctaattattgtaatgtaataaaaat

SEQ ID NO: 5881 - RNA, 25 nt, synthetic construct
  misc_feature 1..25: note = Description of Artificial Sequence: Syntheticoligonucleotide
  source 1..25: mol_type = other RNA
taattattgtaatgtaataaaaata

SEQ ID NO: 5882 - RNA, 25 nt, synthetic construct
  misc_feature 1..25: note = Description of Artificial Sequence: Syntheticoligonucleotide
  source 1..25: mol_type = other RNA
attattgtaatgtaataaaaatagt

SEQ ID NO: 5883 - RNA, 25 nt, synthetic construct
  misc_feature 1..25: note = Description of Artificial Sequence: Syntheticoligonucleotide
  source 1..25: mol_type = other RNA
tattgtaatgtaataaaaatagtta

SEQ ID NO: 5884 - RNA, 25 nt, synthetic construct
  misc_feature 1..25: note = Description of Artificial Sequence: Syntheticoligonucleotide
  source 1..25: mol_type = other RNA
attgtaatgtaataaaaatagttac

SEQ ID NO: 5885 - RNA, 25 nt, synthetic construct
  misc_feature 1..25: note = Description of Artificial Sequence: Syntheticoligonucleotide
  source 1..25: mol_type = other RNA
tgtaatgtaataaaaatagttacag

SEQ ID NO: 5886 - RNA, 25 nt, synthetic construct
  misc_feature 1..25: note = Description of Artificial Sequence: Syntheticoligonucleotide
  source 1..25: mol_type = other RNA
gtaatgtaataaaaatagttacagt

SEQ ID NO: 5887 - RNA, 25 nt, synthetic construct
  misc_feature 1..25: note = Description of Artificial Sequence: Syntheticoligonucleotide
  source 1..25: mol_type = other RNA
tgtaataaaaatagttacagtgaca

SEQ ID NO: 5888 - RNA, 25 nt, synthetic construct
  misc_feature 1..25: note = Description of Artificial Sequence: Syntheticoligonucleotide
  source 1..25: mol_type = other RNA
gtaataaaaatagttacagtgacaa

SEQ ID NO: 5889 - RNA, 25 nt, synthetic construct
  misc_feature 1..25: note = Description of Artificial Sequence: Syntheticoligonucleotide
  source 1..25: mol_type = other RNA
taataaaaatagttacagtgacaaa

SEQ ID NO: 5890 - RNA, 25 nt, synthetic construct
  misc_feature 1..25: note = Description of Artificial Sequence: Syntheticoligonucleotide
  source 1..25: mol_type = other RNA
atagttacagtgacaaaaaaaaaaa

SEQ ID NO: 5891 - RNA, 25 nt, synthetic construct
  misc_feature 1..25: note = Description of Artificial Sequence: Syntheticoligonucleotide
  source 1..25: mol_type = other RNA
tagttacagtgacaaaaaaaaaaaa

SEQ ID NO: 5892 - RNA, 25 nt, synthetic construct
  misc_feature 1..25: note = Description of Artificial Sequence: Syntheticoligonucleotide
  source 1..25: mol_type = other RNA
gttacagtgacaaaaaaaaaaaaaa

SEQ ID NO: 5893 - RNA, 25 nt, synthetic construct
  misc_feature 1..25: note = Description of Artificial Sequence: Syntheticoligonucleotide
  source 1..25: mol_type = other RNA
tgctgaaaatgactgaatataaact

SEQ ID NO: 5894 - RNA, 25 nt, synthetic construct
  misc_feature 1..25: note = Description of Artificial Sequence: Syntheticoligonucleotide
  source 1..25: mol_type = other RNA
aaatgactgaatataaacttgtggt

SEQ ID NO: 5895 - RNA, 25 nt, synthetic construct
  misc_feature 1..25: note = Description of Artificial Sequence: Syntheticoligonucleotide
  source 1..25: mol_type = other RNA
gactgaatataaacttgtggtagtt

SEQ ID NO: 5896 - RNA, 25 nt, synthetic construct
  misc_feature 1..25: note = Description of Artificial Sequence: Syntheticoligonucleotide
  source 1..25: mol_type = other RNA
agctaattcagaatcattttgtgga

SEQ ID NO: 5897 - RNA, 25 nt, synthetic construct
  misc_feature 1..25: note = Description of Artificial Sequence: Syntheticoligonucleotide
  source 1..25: mol_type = other RNA
acgaatatgatccaacaatagagga

SEQ ID NO: 5898 - RNA, 25 nt, synthetic construct
  misc_feature 1..25: note = Description of Artificial Sequence: Syntheticoligonucleotide
  source 1..25: mol_type = other RNA
agcaagtagtaattgatggagaaac

SEQ ID NO: 5899 - RNA, 25 nt, synthetic construct
  misc_feature 1..25: note = Description of Artificial Sequence: Syntheticoligonucleotide
  source 1..25: mol_type = other RNA
ggagggctttctttgtgtatttgcc

SEQ ID NO: 5900 - RNA, 25 nt, synthetic construct
  misc_feature 1..25: note = Description of Artificial Sequence: Syntheticoligonucleotide
  source 1..25: mol_type = other RNA
tctttgtgtatttgccataaataat

SEQ ID NO: 5901 - RNA, 25 nt, synthetic construct
  misc_feature 1..25: note = Description of Artificial Sequence: Syntheticoligonucleotide
  source 1..25: mol_type = other RNA
ctttgtgtatttgccataaataata

SEQ ID NO: 5902 - RNA, 25 nt, synthetic construct
  misc_feature 1..25: note = Description of Artificial Sequence: Syntheticoligonucleotide
  source 1..25: mol_type = other RNA
tttgtgtatttgccataaataatac

SEQ ID NO: 5903 - RNA, 25 nt, synthetic construct
  misc_feature 1..25: note = Description of Artificial Sequence: Syntheticoligonucleotide
  source 1..25: mol_type = other RNA
ttgtgtatttgccataaataatact

SEQ ID NO: 5904 - RNA, 25 nt, synthetic construct
  misc_feature 1..25: note = Description of Artificial Sequence: Syntheticoligonucleotide
  source 1..25: mol_type = other RNA
gtatttgccataaataatactaaat

SEQ ID NO: 5905 - RNA, 25 nt, synthetic construct
  misc_feature 1..25: note = Description of Artificial Sequence: Syntheticoligonucleotide
  source 1..25: mol_type = other RNA
tatttgccataaataatactaaatc

SEQ ID NO: 5906 - RNA, 25 nt, synthetic construct
  misc_feature 1..25: note = Description of Artificial Sequence: Syntheticoligonucleotide
  source 1..25: mol_type = other RNA
ccataaataatactaaatcatttga

SEQ ID NO: 5907 - RNA, 25 nt, synthetic construct
  misc_feature 1..25: note = Description of Artificial Sequence: Syntheticoligonucleotide
  source 1..25: mol_type = other RNA
cataaataatactaaatcatttgaa

SEQ ID NO: 5908 - RNA, 25 nt, synthetic construct
  misc_feature 1..25: note = Description of Artificial Sequence: Syntheticoligonucleotide
  source 1..25: mol_type = other RNA
taaataatactaaatcatttgaaga

SEQ ID NO: 5909 - RNA, 25 nt, synthetic construct
  misc_feature 1..25: note = Description of Artificial Sequence: Syntheticoligonucleotide
  source 1..25: mol_type = other RNA
aaataatactaaatcatttgaagat

SEQ ID NO: 5910 - RNA, 25 nt, synthetic construct
  misc_feature 1..25: note = Description of Artificial Sequence: Syntheticoligonucleotide
  source 1..25: mol_type = other RNA
aataatactaaatcatttgaagata

SEQ ID NO: 5911 - RNA, 25 nt, synthetic construct
  misc_feature 1..25: note = Description of Artificial Sequence: Syntheticoligonucleotide
  source 1..25: mol_type = other RNA
ataatactaaatcatttgaagatat

SEQ ID NO: 5912 - RNA, 25 nt, synthetic construct
  misc_feature 1..25: note = Description of Artificial Sequence: Syntheticoligonucleotide
  source 1..25: mol_type = other RNA
atttgaagatattcaccattataga

SEQ ID NO: 5913 - RNA, 25 nt, synthetic construct
  misc_feature 1..25: note = Description of Artificial Sequence: Syntheticoligonucleotide
  source 1..25: mol_type = other RNA
ttgaagatattcaccattatagaga

SEQ ID NO: 5914 - RNA, 25 nt, synthetic construct
  misc_feature 1..25: note = Description of Artificial Sequence: Syntheticoligonucleotide
  source 1..25: mol_type = other RNA
tgaagatattcaccattatagagaa

SEQ ID NO: 5915 - RNA, 25 nt, synthetic construct
  misc_feature 1..25: note = Description of Artificial Sequence: Syntheticoligonucleotide
  source 1..25: mol_type = other RNA
gaagatattcaccattatagagaac

SEQ ID NO: 5916 - RNA, 25 nt, synthetic construct
  misc_feature 1..25: note = Description of Artificial Sequence: Syntheticoligonucleotide
  source 1..25: mol_type = other RNA
aagatattcaccattatagagaaca

SEQ ID NO: 5917 - RNA, 25 nt, synthetic construct
  misc_feature 1..25: note = Description of Artificial Sequence: Syntheticoligonucleotide
  source 1..25: mol_type = other RNA
ccattatagagaacaaattaaaaga

SEQ ID NO: 5918 - RNA, 25 nt, synthetic construct
  misc_feature 1..25: note = Description of Artificial Sequence: Syntheticoligonucleotide
  source 1..25: mol_type = other RNA
attatagagaacaaattaaaagagt

SEQ ID NO: 5919 - RNA, 25 nt, synthetic construct
  misc_feature 1..25: note = Description of Artificial Sequence: Syntheticoligonucleotide
  source 1..25: mol_type = other RNA
ttatagagaacaaattaaaagagtt

SEQ ID NO: 5920 - RNA, 25 nt, synthetic construct
  misc_feature 1..25: note = Description of Artificial Sequence: Syntheticoligonucleotide
  source 1..25: mol_type = other RNA
tatagagaacaaattaaaagagtta

SEQ ID NO: 5921 - RNA, 25 nt, synthetic construct
  misc_feature 1..25: note = Description of Artificial Sequence: Syntheticoligonucleotide
  source 1..25: mol_type = other RNA
atagagaacaaattaaaagagttaa

SEQ ID NO: 5922 - RNA, 25 nt, synthetic construct
  misc_feature 1..25: note = Description of Artificial Sequence: Syntheticoligonucleotide
  source 1..25: mol_type = other RNA
ctagtaggaaataaatgtgatttgc

SEQ ID NO: 5923 - RNA, 25 nt, synthetic construct
  misc_feature 1..25: note = Description of Artificial Sequence: Syntheticoligonucleotide
  source 1..25: mol_type = other RNA
tagtaggaaataaatgtgatttgcc

SEQ ID NO: 5924 - RNA, 25 nt, synthetic construct
  misc_feature 1..25: note = Description of Artificial Sequence: Syntheticoligonucleotide
  source 1..25: mol_type = other RNA
aagaagttatggaattccttttatt

SEQ ID NO: 5925 - RNA, 25 nt, synthetic construct
  misc_feature 1..25: note = Description of Artificial Sequence: Syntheticoligonucleotide
  source 1..25: mol_type = other RNA
aagttatggaattccttttattgaa

SEQ ID NO: 5926 - RNA, 25 nt, synthetic construct
  misc_feature 1..25: note = Description of Artificial Sequence: Syntheticoligonucleotide
  source 1..25: mol_type = other RNA
agttatggaattccttttattgaaa

SEQ ID NO: 5927 - RNA, 25 nt, synthetic construct
  misc_feature 1..25: note = Description of Artificial Sequence: Syntheticoligonucleotide
  source 1..25: mol_type = other RNA
gttatggaattccttttattgaaac

SEQ ID NO: 5928 - RNA, 25 nt, synthetic construct
  misc_feature 1..25: note = Description of Artificial Sequence: Syntheticoligonucleotide
  source 1..25: mol_type = other RNA
ttatggaattccttttattgaaaca

SEQ ID NO: 5929 - RNA, 25 nt, synthetic construct
  misc_feature 1..25: note = Description of Artificial Sequence: Syntheticoligonucleotide
  source 1..25: mol_type = other RNA
tggaggatgctttttatacattggt

SEQ ID NO: 5930 - RNA, 25 nt, synthetic construct
  misc_feature 1..25: note = Description of Artificial Sequence: Syntheticoligonucleotide
  source 1..25: mol_type = other RNA
gaggatgctttttatacattggtga

SEQ ID NO: 5931 - RNA, 25 nt, synthetic construct
  misc_feature 1..25: note = Description of Artificial Sequence: Syntheticoligonucleotide
  source 1..25: mol_type = other RNA
acagattgaaaaaaatcagcaaaga

SEQ ID NO: 5932 - RNA, 25 nt, synthetic construct
  misc_feature 1..25: note = Description of Artificial Sequence: Syntheticoligonucleotide
  source 1..25: mol_type = other RNA
cagattgaaaaaaatcagcaaagaa

SEQ ID NO: 5933 - RNA, 25 nt, synthetic construct
  misc_feature 1..25: note = Description of Artificial Sequence: Syntheticoligonucleotide
  source 1..25: mol_type = other RNA
gattgaaaaaaatcagcaaagaaga

SEQ ID NO: 5934 - RNA, 25 nt, synthetic construct
  misc_feature 1..25: note = Description of Artificial Sequence: Syntheticoligonucleotide
  source 1..25: mol_type = other RNA
attgaaaaaaatcagcaaagaagaa

SEQ ID NO: 5935 - RNA, 25 nt, synthetic construct
  misc_feature 1..25: note = Description of Artificial Sequence: Syntheticoligonucleotide
  source 1..25: mol_type = other RNA
ttgaaaaaaatcagcaaagaagaaa

SEQ ID NO: 5936 - RNA, 25 nt, synthetic construct
  misc_feature 1..25: note = Description of Artificial Sequence: Syntheticoligonucleotide
  source 1..25: mol_type = other RNA
tgaaaaaaatcagcaaagaagaaaa

SEQ ID NO: 5937 - RNA, 25 nt, synthetic construct
  misc_feature 1..25: note = Description of Artificial Sequence: Syntheticoligonucleotide
  source 1..25: mol_type = other RNA
tcctggctgtgtgaaaattaaaaaa

SEQ ID NO: 5938 - RNA, 25 nt, synthetic construct
  misc_feature 1..25: note = Description of Artificial Sequence: Syntheticoligonucleotide
  source 1..25: mol_type = other RNA
ggctgtgtgaaaattaaaaaatgca

SEQ ID NO: 5939 - RNA, 25 nt, synthetic construct
  misc_feature 1..25: note = Description of Artificial Sequence: Syntheticoligonucleotide
  source 1..25: mol_type = other RNA
gtgtgaaaattaaaaaatgcattat

SEQ ID NO: 5940 - RNA, 25 nt, synthetic construct
  misc_feature 1..25: note = Description of Artificial Sequence: Syntheticoligonucleotide
  source 1..25: mol_type = other RNA
tgtgaaaattaaaaaatgcattata

SEQ ID NO: 5941 - RNA, 25 nt, synthetic construct
  misc_feature 1..25: note = Description of Artificial Sequence: Syntheticoligonucleotide
  source 1..25: mol_type = other RNA
gtgaaaattaaaaaatgcattataa

SEQ ID NO: 5942 - RNA, 25 nt, synthetic construct
  misc_feature 1..25: note = Description of Artificial Sequence: Syntheticoligonucleotide
  source 1..25: mol_type = other RNA
tgaaaattaaaaaatgcattataat

SEQ ID NO: 5943 - RNA, 25 nt, synthetic construct
  misc_feature 1..25: note = Description of Artificial Sequence: Syntheticoligonucleotide
  source 1..25: mol_type = other RNA
aaaattaaaaaatgcattataatgt

SEQ ID NO: 5944 - RNA, 25 nt, synthetic construct
  misc_feature 1..25: note = Description of Artificial Sequence: Syntheticoligonucleotide
  source 1..25: mol_type = other RNA
aaattaaaaaatgcattataatgta

SEQ ID NO: 5945 - RNA, 25 nt, synthetic construct
  misc_feature 1..25: note = Description of Artificial Sequence: Syntheticoligonucleotide
  source 1..25: mol_type = other RNA
aattaaaaaatgcattataatgtaa

SEQ ID NO: 5946 - RNA, 25 nt, synthetic construct
  misc_feature 1..25: note = Description of Artificial Sequence: Syntheticoligonucleotide
  source 1..25: mol_type = other RNA
attaaaaaatgcattataatgtaat

SEQ ID NO: 5947 - RNA, 25 nt, synthetic construct
  misc_feature 1..25: note = Description of Artificial Sequence: Syntheticoligonucleotide
  source 1..25: mol_type = other RNA
taaaaaatgcattataatgtaatct

SEQ ID NO: 5948 - RNA, 25 nt, synthetic construct
  misc_feature 1..25: note = Description of Artificial Sequence: Syntheticoligonucleotide
  source 1..25: mol_type = other RNA
tgcattataatgtaatctgggtgtt

SEQ ID NO: 5949 - RNA, 25 nt, synthetic construct
  misc_feature 1..25: note = Description of Artificial Sequence: Syntheticoligonucleotide
  source 1..25: mol_type = other RNA
ttcgagaaattcgaaaacataaaga

SEQ ID NO: 5950 - RNA, 25 nt, synthetic construct
  misc_feature 1..25: note = Description of Artificial Sequence: Syntheticoligonucleotide
  source 1..25: mol_type = other RNA
tcgagaaattcgaaaacataaagaa

SEQ ID NO: 5951 - RNA, 25 nt, synthetic construct
  misc_feature 1..25: note = Description of Artificial Sequence: Syntheticoligonucleotide
  source 1..25: mol_type = other RNA
cgagaaattcgaaaacataaagaaa

SEQ ID NO: 5952 - RNA, 25 nt, synthetic construct
  misc_feature 1..25: note = Description of Artificial Sequence: Syntheticoligonucleotide
  source 1..25: mol_type = other RNA
gaaattcgaaaacataaagaaaaga

SEQ ID NO: 5953 - RNA, 25 nt, synthetic construct
  misc_feature 1..25: note = Description of Artificial Sequence: Syntheticoligonucleotide
  source 1..25: mol_type = other RNA
tcgaaaacataaagaaaagatgagc

SEQ ID NO: 5954 - RNA, 25 nt, synthetic construct
  misc_feature 1..25: note = Description of Artificial Sequence: Syntheticoligonucleotide
  source 1..25: mol_type = other RNA
cgaaaacataaagaaaagatgagca

SEQ ID NO: 5955 - RNA, 25 nt, synthetic construct
  misc_feature 1..25: note = Description of Artificial Sequence: Syntheticoligonucleotide
  source 1..25: mol_type = other RNA
aaagatggtaaaaagaagaaaaaga

SEQ ID NO: 5956 - RNA, 25 nt, synthetic construct
  misc_feature 1..25: note = Description of Artificial Sequence: Syntheticoligonucleotide
  source 1..25: mol_type = other RNA
aagatggtaaaaagaagaaaaagaa

SEQ ID NO: 5957 - RNA, 25 nt, synthetic construct
  misc_feature 1..25: note = Description of Artificial Sequence: Syntheticoligonucleotide
  source 1..25: mol_type = other RNA
gatggtaaaaagaagaaaaagaagt

SEQ ID NO: 5958 - RNA, 25 nt, synthetic construct
  misc_feature 1..25: note = Description of Artificial Sequence: Syntheticoligonucleotide
  source 1..25: mol_type = other RNA
atggtaaaaagaagaaaaagaagtc

SEQ ID NO: 5959 - RNA, 25 nt, synthetic construct
  misc_feature 1..25: note = Description of Artificial Sequence: Syntheticoligonucleotide
  source 1..25: mol_type = other RNA
aaaaagaagaaaaagaagtcaaaga

SEQ ID NO: 5960 - RNA, 25 nt, synthetic construct
  misc_feature 1..25: note = Description of Artificial Sequence: Syntheticoligonucleotide
  source 1..25: mol_type = other RNA
aaaagaagaaaaagaagtcaaagac

SEQ ID NO: 5961 - RNA, 25 nt, synthetic construct
  misc_feature 1..25: note = Description of Artificial Sequence: Syntheticoligonucleotide
  source 1..25: mol_type = other RNA
aaagaagaaaaagaagtcaaagaca

SEQ ID NO: 5962 - RNA, 25 nt, synthetic construct
  misc_feature 1..25: note = Description of Artificial Sequence: Syntheticoligonucleotide
  source 1..25: mol_type = other RNA
tcaaagacaaagtgtgtaattatgt

SEQ ID NO: 5963 - RNA, 25 nt, synthetic construct
  misc_feature 1..25: note = Description of Artificial Sequence: Syntheticoligonucleotide
  source 1..25: mol_type = other RNA
caaagacaaagtgtgtaattatgta

SEQ ID NO: 5964 - RNA, 25 nt, synthetic construct
  misc_feature 1..25: note = Description of Artificial Sequence: Syntheticoligonucleotide
  source 1..25: mol_type = other RNA
gacaaagtgtgtaattatgtaaata

SEQ ID NO: 5965 - RNA, 25 nt, synthetic construct
  misc_feature 1..25: note = Description of Artificial Sequence: Syntheticoligonucleotide
  source 1..25: mol_type = other RNA
caaagtgtgtaattatgtaaataca

SEQ ID NO: 5966 - RNA, 25 nt, synthetic construct
  misc_feature 1..25: note = Description of Artificial Sequence: Syntheticoligonucleotide
  source 1..25: mol_type = other RNA
gtgtgtaattatgtaaatacaattt

SEQ ID NO: 5967 - RNA, 25 nt, synthetic construct
  misc_feature 1..25: note = Description of Artificial Sequence: Syntheticoligonucleotide
  source 1..25: mol_type = other RNA
gtgtaattatgtaaatacaatttgt

SEQ ID NO: 5968 - RNA, 25 nt, synthetic construct
  misc_feature 1..25: note = Description of Artificial Sequence: Syntheticoligonucleotide
  source 1..25: mol_type = other RNA
gtaattatgtaaatacaatttgtac

SEQ ID NO: 5969 - RNA, 25 nt, synthetic construct
  misc_feature 1..25: note = Description of Artificial Sequence: Syntheticoligonucleotide
  source 1..25: mol_type = other RNA
taattatgtaaatacaatttgtact

SEQ ID NO: 5970 - RNA, 25 nt, synthetic construct
  misc_feature 1..25: note = Description of Artificial Sequence: Syntheticoligonucleotide
  source 1..25: mol_type = other RNA
tatgtaaatacaatttgtacttttt

SEQ ID NO: 5971 - RNA, 25 nt, synthetic construct
  misc_feature 1..25: note = Description of Artificial Sequence: Syntheticoligonucleotide
  source 1..25: mol_type = other RNA
atgtaaatacaatttgtactttttt

SEQ ID NO: 5972 - RNA, 25 nt, synthetic construct
  misc_feature 1..25: note = Description of Artificial Sequence: Syntheticoligonucleotide
  source 1..25: mol_type = other RNA
tgtaaatacaatttgtacttttttc

SEQ ID NO: 5973 - RNA, 25 nt, synthetic construct
  misc_feature 1..25: note = Description of Artificial Sequence: Syntheticoligonucleotide
  source 1..25: mol_type = other RNA
gtaaatacaatttgtacttttttct

SEQ ID NO: 5974 - RNA, 25 nt, synthetic construct
  misc_feature 1..25: note = Description of Artificial Sequence: Syntheticoligonucleotide
  source 1..25: mol_type = other RNA
acaatttgtacttttttcttaaggc

SEQ ID NO: 5975 - RNA, 25 nt, synthetic construct
  misc_feature 1..25: note = Description of Artificial Sequence: Syntheticoligonucleotide
  source 1..25: mol_type = other RNA
caatttgtacttttttcttaaggca

SEQ ID NO: 5976 - RNA, 25 nt, synthetic construct
  misc_feature 1..25: note = Description of Artificial Sequence: Syntheticoligonucleotide
  source 1..25: mol_type = other RNA
tactagtacaagtggtaatttttgt

SEQ ID NO: 5977 - RNA, 25 nt, synthetic construct
  misc_feature 1..25: note = Description of Artificial Sequence: Syntheticoligonucleotide
  source 1..25: mol_type = other RNA
actagtacaagtggtaatttttgta

SEQ ID NO: 5978 - RNA, 25 nt, synthetic construct
  misc_feature 1..25: note = Description of Artificial Sequence: Syntheticoligonucleotide
  source 1..25: mol_type = other RNA
acaagtggtaatttttgtacattac

SEQ ID NO: 5979 - RNA, 25 nt, synthetic construct
  misc_feature 1..25: note = Description of Artificial Sequence: Syntheticoligonucleotide
  source 1..25: mol_type = other RNA
caagtggtaatttttgtacattaca

SEQ ID NO: 5980 - RNA, 25 nt, synthetic construct
  misc_feature 1..25: note = Description of Artificial Sequence: Syntheticoligonucleotide
  source 1..25: mol_type = other RNA
taatttttgtacattacactaaatt

SEQ ID NO: 5981 - RNA, 25 nt, synthetic construct
  misc_feature 1..25: note = Description of Artificial Sequence: Syntheticoligonucleotide
  source 1..25: mol_type = other RNA
aatttttgtacattacactaaatta

SEQ ID NO: 5982 - RNA, 25 nt, synthetic construct
  misc_feature 1..25: note = Description of Artificial Sequence: Syntheticoligonucleotide
  source 1..25: mol_type = other RNA
atttttgtacattacactaaattat

SEQ ID NO: 5983 - RNA, 25 nt, synthetic construct
  misc_feature 1..25: note = Description of Artificial Sequence: Syntheticoligonucleotide
  source 1..25: mol_type = other RNA
tttttgtacattacactaaattatt

SEQ ID NO: 5984 - RNA, 25 nt, synthetic construct
  misc_feature 1..25: note = Description of Artificial Sequence: Syntheticoligonucleotide
  source 1..25: mol_type = other RNA
ttttgtacattacactaaattatta

SEQ ID NO: 5985 - RNA, 25 nt, synthetic construct
  misc_feature 1..25: note = Description of Artificial Sequence: Syntheticoligonucleotide
  source 1..25: mol_type = other RNA
cactaaattattagcatttgtttta

SEQ ID NO: 5986 - RNA, 25 nt, synthetic construct
  misc_feature 1..25: note = Description of Artificial Sequence: Syntheticoligonucleotide
  source 1..25: mol_type = other RNA
ctaaattattagcatttgttttagc

SEQ ID NO: 5987 - RNA, 25 nt, synthetic construct
  misc_feature 1..25: note = Description of Artificial Sequence: Syntheticoligonucleotide
  source 1..25: mol_type = other RNA
taaattattagcatttgttttagca

SEQ ID NO: 5988 - RNA, 25 nt, synthetic construct
  misc_feature 1..25: note = Description of Artificial Sequence: Syntheticoligonucleotide
  source 1..25: mol_type = other RNA
tattagcatttgttttagcattacc

SEQ ID NO: 5989 - RNA, 25 nt, synthetic construct
  misc_feature 1..25: note = Description of Artificial Sequence: Syntheticoligonucleotide
  source 1..25: mol_type = other RNA
catttgttttagcattacctaattt

SEQ ID NO: 5990 - RNA, 25 nt, synthetic construct
  misc_feature 1..25: note = Description of Artificial Sequence: Syntheticoligonucleotide
  source 1..25: mol_type = other RNA
atttgttttagcattacctaatttt

SEQ ID NO: 5991 - RNA, 25 nt, synthetic construct
  misc_feature 1..25: note = Description of Artificial Sequence: Syntheticoligonucleotide
  source 1..25: mol_type = other RNA
ttgttttagcattacctaatttttt

SEQ ID NO: 5992 - RNA, 25 nt, synthetic construct
  misc_feature 1..25: note = Description of Artificial Sequence: Syntheticoligonucleotide
  source 1..25: mol_type = other RNA
tgttttagcattacctaattttttt

SEQ ID NO: 5993 - RNA, 25 nt, synthetic construct
  misc_feature 1..25: note = Description of Artificial Sequence: Syntheticoligonucleotide
  source 1..25: mol_type = other RNA
gttttagcattacctaatttttttc

SEQ ID NO: 5994 - RNA, 25 nt, synthetic construct
  misc_feature 1..25: note = Description of Artificial Sequence: Syntheticoligonucleotide
  source 1..25: mol_type = other RNA
ttttagcattacctaatttttttcc

SEQ ID NO: 5995 - RNA, 25 nt, synthetic construct
  misc_feature 1..25: note = Description of Artificial Sequence: Syntheticoligonucleotide
  source 1..25: mol_type = other RNA
gactgttagcttttaccttaaatgc

SEQ ID NO: 5996 - RNA, 25 nt, synthetic construct
  misc_feature 1..25: note = Description of Artificial Sequence: Syntheticoligonucleotide
  source 1..25: mol_type = other RNA
actgttagcttttaccttaaatgct

SEQ ID NO: 5997 - RNA, 25 nt, synthetic construct
  misc_feature 1..25: note = Description of Artificial Sequence: Syntheticoligonucleotide
  source 1..25: mol_type = other RNA
agcttttaccttaaatgcttatttt

SEQ ID NO: 5998 - RNA, 25 nt, synthetic construct
  misc_feature 1..25: note = Description of Artificial Sequence: Syntheticoligonucleotide
  source 1..25: mol_type = other RNA
gcttttaccttaaatgcttatttta

SEQ ID NO: 5999 - RNA, 25 nt, synthetic construct
  misc_feature 1..25: note = Description of Artificial Sequence: Syntheticoligonucleotide
  source 1..25: mol_type = other RNA
cttttaccttaaatgcttattttaa

SEQ ID NO: 6000 - RNA, 25 nt, synthetic construct
  misc_feature 1..25: note = Description of Artificial Sequence: Syntheticoligonucleotide
  source 1..25: mol_type = other RNA
ccttaaatgcttattttaaaatgac

SEQ ID NO: 6001 - RNA, 25 nt, synthetic construct
  misc_feature 1..25: note = Description of Artificial Sequence: Syntheticoligonucleotide
  source 1..25: mol_type = other RNA
cttaaatgcttattttaaaatgaca

SEQ ID NO: 6002 - RNA, 25 nt, synthetic construct
  misc_feature 1..25: note = Description of Artificial Sequence: Syntheticoligonucleotide
  source 1..25: mol_type = other RNA
tgcttattttaaaatgacagtggaa

SEQ ID NO: 6003 - RNA, 25 nt, synthetic construct
  misc_feature 1..25: note = Description of Artificial Sequence: Syntheticoligonucleotide
  source 1..25: mol_type = other RNA
cttattttaaaatgacagtggaagt

SEQ ID NO: 6004 - RNA, 25 nt, synthetic construct
  misc_feature 1..25: note = Description of Artificial Sequence: Syntheticoligonucleotide
  source 1..25: mol_type = other RNA
gtggaagtttttttttcctctaagt

SEQ ID NO: 6005 - RNA, 25 nt, synthetic construct
  misc_feature 1..25: note = Description of Artificial Sequence: Syntheticoligonucleotide
  source 1..25: mol_type = other RNA
ggaagtttttttttcctctaagtgc

SEQ ID NO: 6006 - RNA, 25 nt, synthetic construct
  misc_feature 1..25: note = Description of Artificial Sequence: Syntheticoligonucleotide
  source 1..25: mol_type = other RNA
gaagtttttttttcctctaagtgcc

SEQ ID NO: 6007 - RNA, 25 nt, synthetic construct
  misc_feature 1..25: note = Description of Artificial Sequence: Syntheticoligonucleotide
  source 1..25: mol_type = other RNA
ttttggtttttgaactagcaatgcc

SEQ ID NO: 6008 - RNA, 25 nt, synthetic construct
  misc_feature 1..25: note = Description of Artificial Sequence: Syntheticoligonucleotide
  source 1..25: mol_type = other RNA
gcctgtgaaaaagaaactgaatacc

SEQ ID NO: 6009 - RNA, 25 nt, synthetic construct
  misc_feature 1..25: note = Description of Artificial Sequence: Syntheticoligonucleotide
  source 1..25: mol_type = other RNA
aaaaagaaactgaatacctaagatt

SEQ ID NO: 6010 - RNA, 25 nt, synthetic construct
  misc_feature 1..25: note = Description of Artificial Sequence: Syntheticoligonucleotide
  source 1..25: mol_type = other RNA
aaaagaaactgaatacctaagattt

SEQ ID NO: 6011 - RNA, 25 nt, synthetic construct
  misc_feature 1..25: note = Description of Artificial Sequence: Syntheticoligonucleotide
  source 1..25: mol_type = other RNA
aactgaatacctaagatttctgtct

SEQ ID NO: 6012 - RNA, 25 nt, synthetic construct
  misc_feature 1..25: note = Description of Artificial Sequence: Syntheticoligonucleotide
  source 1..25: mol_type = other RNA
tgcagttgattacttcttatttttc

SEQ ID NO: 6013 - RNA, 25 nt, synthetic construct
  misc_feature 1..25: note = Description of Artificial Sequence: Syntheticoligonucleotide
  source 1..25: mol_type = other RNA
gcagttgattacttcttatttttct

SEQ ID NO: 6014 - RNA, 25 nt, synthetic construct
  misc_feature 1..25: note = Description of Artificial Sequence: Syntheticoligonucleotide
  source 1..25: mol_type = other RNA
ttgattacttcttatttttcttacc

SEQ ID NO: 6015 - RNA, 25 nt, synthetic construct
  misc_feature 1..25: note = Description of Artificial Sequence: Syntheticoligonucleotide
  source 1..25: mol_type = other RNA
ttcttatttttcttaccaattgtga

SEQ ID NO: 6016 - RNA, 25 nt, synthetic construct
  misc_feature 1..25: note = Description of Artificial Sequence: Syntheticoligonucleotide
  source 1..25: mol_type = other RNA
tcttatttttcttaccaattgtgaa

SEQ ID NO: 6017 - RNA, 25 nt, synthetic construct
  misc_feature 1..25: note = Description of Artificial Sequence: Syntheticoligonucleotide
  source 1..25: mol_type = other RNA
cttatttttcttaccaattgtgaat

SEQ ID NO: 6018 - RNA, 25 nt, synthetic construct
  misc_feature 1..25: note = Description of Artificial Sequence: Syntheticoligonucleotide
  source 1..25: mol_type = other RNA
atgttggtgtgaaacaaattaatga

SEQ ID NO: 6019 - RNA, 25 nt, synthetic construct
  misc_feature 1..25: note = Description of Artificial Sequence: Syntheticoligonucleotide
  source 1..25: mol_type = other RNA
ttggtgtgaaacaaattaatgaagc

SEQ ID NO: 6020 - RNA, 25 nt, synthetic construct
  misc_feature 1..25: note = Description of Artificial Sequence: Syntheticoligonucleotide
  source 1..25: mol_type = other RNA
tggtgtgaaacaaattaatgaagct

SEQ ID NO: 6021 - RNA, 25 nt, synthetic construct
  misc_feature 1..25: note = Description of Artificial Sequence: Syntheticoligonucleotide
  source 1..25: mol_type = other RNA
aacaaattaatgaagcttttgaatc

SEQ ID NO: 6022 - RNA, 25 nt, synthetic construct
  misc_feature 1..25: note = Description of Artificial Sequence: Syntheticoligonucleotide
  source 1..25: mol_type = other RNA
acaaattaatgaagcttttgaatca

SEQ ID NO: 6023 - RNA, 25 nt, synthetic construct
  misc_feature 1..25: note = Description of Artificial Sequence: Syntheticoligonucleotide
  source 1..25: mol_type = other RNA
tctgtgttttatctagtcacataaa

SEQ ID NO: 6024 - RNA, 25 nt, synthetic construct
  misc_feature 1..25: note = Description of Artificial Sequence: Syntheticoligonucleotide
  source 1..25: mol_type = other RNA
ctgtgttttatctagtcacataaat

SEQ ID NO: 6025 - RNA, 25 nt, synthetic construct
  misc_feature 1..25: note = Description of Artificial Sequence: Syntheticoligonucleotide
  source 1..25: mol_type = other RNA
tgttttatctagtcacataaatgga

SEQ ID NO: 6026 - RNA, 25 nt, synthetic construct
  misc_feature 1..25: note = Description of Artificial Sequence: Syntheticoligonucleotide
  source 1..25: mol_type = other RNA
gttttatctagtcacataaatggat

SEQ ID NO: 6027 - RNA, 25 nt, synthetic construct
  misc_feature 1..25: note = Description of Artificial Sequence: Syntheticoligonucleotide
  source 1..25: mol_type = other RNA
atctagtcacataaatggattaatt

SEQ ID NO: 6028 - RNA, 25 nt, synthetic construct
  misc_feature 1..25: note = Description of Artificial Sequence: Syntheticoligonucleotide
  source 1..25: mol_type = other RNA
tctagtcacataaatggattaatta

SEQ ID NO: 6029 - RNA, 25 nt, synthetic construct
  misc_feature 1..25: note = Description of Artificial Sequence: Syntheticoligonucleotide
  source 1..25: mol_type = other RNA
cataaatggattaattactaatttc

SEQ ID NO: 6030 - RNA, 25 nt, synthetic construct
  misc_feature 1..25: note = Description of Artificial Sequence: Syntheticoligonucleotide
  source 1..25: mol_type = other RNA
ataaatggattaattactaatttca

SEQ ID NO: 6031 - RNA, 25 nt, synthetic construct
  misc_feature 1..25: note = Description of Artificial Sequence: Syntheticoligonucleotide
  source 1..25: mol_type = other RNA
tggattaattactaatttcagttga

SEQ ID NO: 6032 - RNA, 25 nt, synthetic construct
  misc_feature 1..25: note = Description of Artificial Sequence: Syntheticoligonucleotide
  source 1..25: mol_type = other RNA
gattaattactaatttcagttgaga

SEQ ID NO: 6033 - RNA, 25 nt, synthetic construct
  misc_feature 1..25: note = Description of Artificial Sequence: Syntheticoligonucleotide
  source 1..25: mol_type = other RNA
attaattactaatttcagttgagac

SEQ ID NO: 6034 - RNA, 25 nt, synthetic construct
  misc_feature 1..25: note = Description of Artificial Sequence: Syntheticoligonucleotide
  source 1..25: mol_type = other RNA
ttaattactaatttcagttgagacc

SEQ ID NO: 6035 - RNA, 25 nt, synthetic construct
  misc_feature 1..25: note = Description of Artificial Sequence: Syntheticoligonucleotide
  source 1..25: mol_type = other RNA
taattggtttttactgaaacattga

SEQ ID NO: 6036 - RNA, 25 nt, synthetic construct
  misc_feature 1..25: note = Description of Artificial Sequence: Syntheticoligonucleotide
  source 1..25: mol_type = other RNA
tggtttttactgaaacattgaggga

SEQ ID NO: 6037 - RNA, 25 nt, synthetic construct
  misc_feature 1..25: note = Description of Artificial Sequence: Syntheticoligonucleotide
  source 1..25: mol_type = other RNA
ggtttttactgaaacattgagggaa

SEQ ID NO: 6038 - RNA, 25 nt, synthetic construct
  misc_feature 1..25: note = Description of Artificial Sequence: Syntheticoligonucleotide
  source 1..25: mol_type = other RNA
attgagggaacacaaatttatgggc

SEQ ID NO: 6039 - RNA, 25 nt, synthetic construct
  misc_feature 1..25: note = Description of Artificial Sequence: Syntheticoligonucleotide
  source 1..25: mol_type = other RNA
ttgagggaacacaaatttatgggct

SEQ ID NO: 6040 - RNA, 25 nt, synthetic construct
  misc_feature 1..25: note = Description of Artificial Sequence: Syntheticoligonucleotide
  source 1..25: mol_type = other RNA
tgatgaatgtaaagttacactgttc

SEQ ID NO: 6041 - RNA, 25 nt, synthetic construct
  misc_feature 1..25: note = Description of Artificial Sequence: Syntheticoligonucleotide
  source 1..25: mol_type = other RNA
gatgaatgtaaagttacactgttca

SEQ ID NO: 6042 - RNA, 25 nt, synthetic construct
  misc_feature 1..25: note = Description of Artificial Sequence: Syntheticoligonucleotide
  source 1..25: mol_type = other RNA
ccaaaatattatattttttctataa

SEQ ID NO: 6043 - RNA, 25 nt, synthetic construct
  misc_feature 1..25: note = Description of Artificial Sequence: Syntheticoligonucleotide
  source 1..25: mol_type = other RNA
caaaatattatattttttctataaa

SEQ ID NO: 6044 - RNA, 25 nt, synthetic construct
  misc_feature 1..25: note = Description of Artificial Sequence: Syntheticoligonucleotide
  source 1..25: mol_type = other RNA
aaaatattatattttttctataaaa

SEQ ID NO: 6045 - RNA, 25 nt, synthetic construct
  misc_feature 1..25: note = Description of Artificial Sequence: Syntheticoligonucleotide
  source 1..25: mol_type = other RNA
aaatattatattttttctataaaaa

SEQ ID NO: 6046 - RNA, 25 nt, synthetic construct
  misc_feature 1..25: note = Description of Artificial Sequence: Syntheticoligonucleotide
  source 1..25: mol_type = other RNA
atattatattttttctataaaaaga

SEQ ID NO: 6047 - RNA, 25 nt, synthetic construct
  misc_feature 1..25: note = Description of Artificial Sequence: Syntheticoligonucleotide
  source 1..25: mol_type = other RNA
tattatattttttctataaaaagaa

SEQ ID NO: 6048 - RNA, 25 nt, synthetic construct
  misc_feature 1..25: note = Description of Artificial Sequence: Syntheticoligonucleotide
  source 1..25: mol_type = other RNA
attatattttttctataaaaagaaa

SEQ ID NO: 6049 - RNA, 25 nt, synthetic construct
  misc_feature 1..25: note = Description of Artificial Sequence: Syntheticoligonucleotide
  source 1..25: mol_type = other RNA
ttatattttttctataaaaagaaaa

SEQ ID NO: 6050 - RNA, 25 nt, synthetic construct
  misc_feature 1..25: note = Description of Artificial Sequence: Syntheticoligonucleotide
  source 1..25: mol_type = other RNA
tatattttttctataaaaagaaaaa

SEQ ID NO: 6051 - RNA, 25 nt, synthetic construct
  misc_feature 1..25: note = Description of Artificial Sequence: Syntheticoligonucleotide
  source 1..25: mol_type = other RNA
atattttttctataaaaagaaaaaa

SEQ ID NO: 6052 - RNA, 25 nt, synthetic construct
  misc_feature 1..25: note = Description of Artificial Sequence: Syntheticoligonucleotide
  source 1..25: mol_type = other RNA
tattttttctataaaaagaaaaaaa

SEQ ID NO: 6053 - RNA, 25 nt, synthetic construct
  misc_feature 1..25: note = Description of Artificial Sequence: Syntheticoligonucleotide
  source 1..25: mol_type = other RNA
attttttctataaaaagaaaaaaat

SEQ ID NO: 6054 - RNA, 25 nt, synthetic construct
  misc_feature 1..25: note = Description of Artificial Sequence: Syntheticoligonucleotide
  source 1..25: mol_type = other RNA
ttctataaaaagaaaaaaatggaaa

SEQ ID NO: 6055 - RNA, 25 nt, synthetic construct
  misc_feature 1..25: note = Description of Artificial Sequence: Syntheticoligonucleotide
  source 1..25: mol_type = other RNA
tctataaaaagaaaaaaatggaaaa

SEQ ID NO: 6056 - RNA, 25 nt, synthetic construct
  misc_feature 1..25: note = Description of Artificial Sequence: Syntheticoligonucleotide
  source 1..25: mol_type = other RNA
tataaaaagaaaaaaatggaaaaaa

SEQ ID NO: 6057 - RNA, 25 nt, synthetic construct
  misc_feature 1..25: note = Description of Artificial Sequence: Syntheticoligonucleotide
  source 1..25: mol_type = other RNA
ataaaaagaaaaaaatggaaaaaaa

SEQ ID NO: 6058 - RNA, 25 nt, synthetic construct
  misc_feature 1..25: note = Description of Artificial Sequence: Syntheticoligonucleotide
  source 1..25: mol_type = other RNA
taaaaagaaaaaaatggaaaaaaat

SEQ ID NO: 6059 - RNA, 25 nt, synthetic construct
  misc_feature 1..25: note = Description of Artificial Sequence: Syntheticoligonucleotide
  source 1..25: mol_type = other RNA
aaaaagaaaaaaatggaaaaaaatt

SEQ ID NO: 6060 - RNA, 25 nt, synthetic construct
  misc_feature 1..25: note = Description of Artificial Sequence: Syntheticoligonucleotide
  source 1..25: mol_type = other RNA
aaaagaaaaaaatggaaaaaaatta

SEQ ID NO: 6061 - RNA, 25 nt, synthetic construct
  misc_feature 1..25: note = Description of Artificial Sequence: Syntheticoligonucleotide
  source 1..25: mol_type = other RNA
aaagaaaaaaatggaaaaaaattac

SEQ ID NO: 6062 - RNA, 25 nt, synthetic construct
  misc_feature 1..25: note = Description of Artificial Sequence: Syntheticoligonucleotide
  source 1..25: mol_type = other RNA
aagaaaaaaatggaaaaaaattaca

SEQ ID NO: 6063 - RNA, 25 nt, synthetic construct
  misc_feature 1..25: note = Description of Artificial Sequence: Syntheticoligonucleotide
  source 1..25: mol_type = other RNA
aaaaaatggaaaaaaattacaaggc

SEQ ID NO: 6064 - RNA, 25 nt, synthetic construct
  misc_feature 1..25: note = Description of Artificial Sequence: Syntheticoligonucleotide
  source 1..25: mol_type = other RNA
aaaaatggaaaaaaattacaaggca

SEQ ID NO: 6065 - RNA, 25 nt, synthetic construct
  misc_feature 1..25: note = Description of Artificial Sequence: Syntheticoligonucleotide
  source 1..25: mol_type = other RNA
tggaaaaaaattacaaggcaatgga

SEQ ID NO: 6066 - RNA, 25 nt, synthetic construct
  misc_feature 1..25: note = Description of Artificial Sequence: Syntheticoligonucleotide
  source 1..25: mol_type = other RNA
ggaaaaaaattacaaggcaatggaa

SEQ ID NO: 6067 - RNA, 25 nt, synthetic construct
  misc_feature 1..25: note = Description of Artificial Sequence: Syntheticoligonucleotide
  source 1..25: mol_type = other RNA
gaaaaaaattacaaggcaatggaaa

SEQ ID NO: 6068 - RNA, 25 nt, synthetic construct
  misc_feature 1..25: note = Description of Artificial Sequence: Syntheticoligonucleotide
  source 1..25: mol_type = other RNA
gccatttccttttcacattagataa

SEQ ID NO: 6069 - RNA, 25 nt, synthetic construct
  misc_feature 1..25: note = Description of Artificial Sequence: Syntheticoligonucleotide
  source 1..25: mol_type = other RNA
tccttttcacattagataaattact

SEQ ID NO: 6070 - RNA, 25 nt, synthetic construct
  misc_feature 1..25: note = Description of Artificial Sequence: Syntheticoligonucleotide
  source 1..25: mol_type = other RNA
cacattagataaattactataaaga

SEQ ID NO: 6071 - RNA, 25 nt, synthetic construct
  misc_feature 1..25: note = Description of Artificial Sequence: Syntheticoligonucleotide
  source 1..25: mol_type = other RNA
acattagataaattactataaagac

SEQ ID NO: 6072 - RNA, 25 nt, synthetic construct
  misc_feature 1..25: note = Description of Artificial Sequence: Syntheticoligonucleotide
  source 1..25: mol_type = other RNA
cattagataaattactataaagact

SEQ ID NO: 6073 - RNA, 25 nt, synthetic construct
  misc_feature 1..25: note = Description of Artificial Sequence: Syntheticoligonucleotide
  source 1..25: mol_type = other RNA
agtatgaaatggggattattatagc

SEQ ID NO: 6074 - RNA, 25 nt, synthetic construct
  misc_feature 1..25: note = Description of Artificial Sequence: Syntheticoligonucleotide
  source 1..25: mol_type = other RNA
tggggattattatagcaaccatttt

SEQ ID NO: 6075 - RNA, 25 nt, synthetic construct
  misc_feature 1..25: note = Description of Artificial Sequence: Syntheticoligonucleotide
  source 1..25: mol_type = other RNA
ggctatatttacatgctactaaatt

SEQ ID NO: 6076 - RNA, 25 nt, synthetic construct
  misc_feature 1..25: note = Description of Artificial Sequence: Syntheticoligonucleotide
  source 1..25: mol_type = other RNA
gctatatttacatgctactaaattt

SEQ ID NO: 6077 - RNA, 25 nt, synthetic construct
  misc_feature 1..25: note = Description of Artificial Sequence: Syntheticoligonucleotide
  source 1..25: mol_type = other RNA
ctatatttacatgctactaaatttt

SEQ ID NO: 6078 - RNA, 25 nt, synthetic construct
  misc_feature 1..25: note = Description of Artificial Sequence: Syntheticoligonucleotide
  source 1..25: mol_type = other RNA
tatatttacatgctactaaattttt

SEQ ID NO: 6079 - RNA, 25 nt, synthetic construct
  misc_feature 1..25: note = Description of Artificial Sequence: Syntheticoligonucleotide
  source 1..25: mol_type = other RNA
atatttacatgctactaaattttta

SEQ ID NO: 6080 - RNA, 25 nt, synthetic construct
  misc_feature 1..25: note = Description of Artificial Sequence: Syntheticoligonucleotide
  source 1..25: mol_type = other RNA
tacatgctactaaatttttataata

SEQ ID NO: 6081 - RNA, 25 nt, synthetic construct
  misc_feature 1..25: note = Description of Artificial Sequence: Syntheticoligonucleotide
  source 1..25: mol_type = other RNA
tactaaatttttataataattgaaa

SEQ ID NO: 6082 - RNA, 25 nt, synthetic construct
  misc_feature 1..25: note = Description of Artificial Sequence: Syntheticoligonucleotide
  source 1..25: mol_type = other RNA
actaaatttttataataattgaaaa

SEQ ID NO: 6083 - RNA, 25 nt, synthetic construct
  misc_feature 1..25: note = Description of Artificial Sequence: Syntheticoligonucleotide
  source 1..25: mol_type = other RNA
taaatttttataataattgaaaaga

SEQ ID NO: 6084 - RNA, 25 nt, synthetic construct
  misc_feature 1..25: note = Description of Artificial Sequence: Syntheticoligonucleotide
  source 1..25: mol_type = other RNA
aaatttttataataattgaaaagat

SEQ ID NO: 6085 - RNA, 25 nt, synthetic construct
  misc_feature 1..25: note = Description of Artificial Sequence: Syntheticoligonucleotide
  source 1..25: mol_type = other RNA
aatttttataataattgaaaagatt

SEQ ID NO: 6086 - RNA, 25 nt, synthetic construct
  misc_feature 1..25: note = Description of Artificial Sequence: Syntheticoligonucleotide
  source 1..25: mol_type = other RNA
atttttataataattgaaaagattt

SEQ ID NO: 6087 - RNA, 25 nt, synthetic construct
  misc_feature 1..25: note = Description of Artificial Sequence: Syntheticoligonucleotide
  source 1..25: mol_type = other RNA
tttttataataattgaaaagatttt

SEQ ID NO: 6088 - RNA, 25 nt, synthetic construct
  misc_feature 1..25: note = Description of Artificial Sequence: Syntheticoligonucleotide
  source 1..25: mol_type = other RNA
ttttataataattgaaaagatttta

SEQ ID NO: 6089 - RNA, 25 nt, synthetic construct
  misc_feature 1..25: note = Description of Artificial Sequence: Syntheticoligonucleotide
  source 1..25: mol_type = other RNA
tttataataattgaaaagattttaa

SEQ ID NO: 6090 - RNA, 25 nt, synthetic construct
  misc_feature 1..25: note = Description of Artificial Sequence: Syntheticoligonucleotide
  source 1..25: mol_type = other RNA
ttataataattgaaaagattttaac

SEQ ID NO: 6091 - RNA, 25 nt, synthetic construct
  misc_feature 1..25: note = Description of Artificial Sequence: Syntheticoligonucleotide
  source 1..25: mol_type = other RNA
tataataattgaaaagattttaaca

SEQ ID NO: 6092 - RNA, 25 nt, synthetic construct
  misc_feature 1..25: note = Description of Artificial Sequence: Syntheticoligonucleotide
  source 1..25: mol_type = other RNA
ataattgaaaagattttaacaagta

SEQ ID NO: 6093 - RNA, 25 nt, synthetic construct
  misc_feature 1..25: note = Description of Artificial Sequence: Syntheticoligonucleotide
  source 1..25: mol_type = other RNA
taattgaaaagattttaacaagtat

SEQ ID NO: 6094 - RNA, 25 nt, synthetic construct
  misc_feature 1..25: note = Description of Artificial Sequence: Syntheticoligonucleotide
  source 1..25: mol_type = other RNA
attgaaaagattttaacaagtataa

SEQ ID NO: 6095 - RNA, 25 nt, synthetic construct
  misc_feature 1..25: note = Description of Artificial Sequence: Syntheticoligonucleotide
  source 1..25: mol_type = other RNA
ttgaaaagattttaacaagtataaa

SEQ ID NO: 6096 - RNA, 25 nt, synthetic construct
  misc_feature 1..25: note = Description of Artificial Sequence: Syntheticoligonucleotide
  source 1..25: mol_type = other RNA
tgaaaagattttaacaagtataaaa

SEQ ID NO: 6097 - RNA, 25 nt, synthetic construct
  misc_feature 1..25: note = Description of Artificial Sequence: Syntheticoligonucleotide
  source 1..25: mol_type = other RNA
gaaaagattttaacaagtataaaaa

SEQ ID NO: 6098 - RNA, 25 nt, synthetic construct
  misc_feature 1..25: note = Description of Artificial Sequence: Syntheticoligonucleotide
  source 1..25: mol_type = other RNA
aaaagattttaacaagtataaaaaa

SEQ ID NO: 6099 - RNA, 25 nt, synthetic construct
  misc_feature 1..25: note = Description of Artificial Sequence: Syntheticoligonucleotide
  source 1..25: mol_type = other RNA
aaagattttaacaagtataaaaaat

SEQ ID NO: 6100 - RNA, 25 nt, synthetic construct
  misc_feature 1..25: note = Description of Artificial Sequence: Syntheticoligonucleotide
  source 1..25: mol_type = other RNA
aagattttaacaagtataaaaaatt

SEQ ID NO: 6101 - RNA, 25 nt, synthetic construct
  misc_feature 1..25: note = Description of Artificial Sequence: Syntheticoligonucleotide
  source 1..25: mol_type = other RNA
agattttaacaagtataaaaaattc

SEQ ID NO: 6102 - RNA, 25 nt, synthetic construct
  misc_feature 1..25: note = Description of Artificial Sequence: Syntheticoligonucleotide
  source 1..25: mol_type = other RNA
gattttaacaagtataaaaaattct

SEQ ID NO: 6103 - RNA, 25 nt, synthetic construct
  misc_feature 1..25: note = Description of Artificial Sequence: Syntheticoligonucleotide
  source 1..25: mol_type = other RNA
acaagtataaaaaattctcatagga

SEQ ID NO: 6104 - RNA, 25 nt, synthetic construct
  misc_feature 1..25: note = Description of Artificial Sequence: Syntheticoligonucleotide
  source 1..25: mol_type = other RNA
caagtataaaaaattctcataggaa

SEQ ID NO: 6105 - RNA, 25 nt, synthetic construct
  misc_feature 1..25: note = Description of Artificial Sequence: Syntheticoligonucleotide
  source 1..25: mol_type = other RNA
aagtataaaaaattctcataggaat

SEQ ID NO: 6106 - RNA, 25 nt, synthetic construct
  misc_feature 1..25: note = Description of Artificial Sequence: Syntheticoligonucleotide
  source 1..25: mol_type = other RNA
agtataaaaaattctcataggaatt

SEQ ID NO: 6107 - RNA, 25 nt, synthetic construct
  misc_feature 1..25: note = Description of Artificial Sequence: Syntheticoligonucleotide
  source 1..25: mol_type = other RNA
gtataaaaaattctcataggaatta

SEQ ID NO: 6108 - RNA, 25 nt, synthetic construct
  misc_feature 1..25: note = Description of Artificial Sequence: Syntheticoligonucleotide
  source 1..25: mol_type = other RNA
tataaaaaattctcataggaattaa

SEQ ID NO: 6109 - RNA, 25 nt, synthetic construct
  misc_feature 1..25: note = Description of Artificial Sequence: Syntheticoligonucleotide
  source 1..25: mol_type = other RNA
ataaaaaattctcataggaattaaa

SEQ ID NO: 6110 - RNA, 25 nt, synthetic construct
  misc_feature 1..25: note = Description of Artificial Sequence: Syntheticoligonucleotide
  source 1..25: mol_type = other RNA
taaaaaattctcataggaattaaat

SEQ ID NO: 6111 - RNA, 25 nt, synthetic construct
  misc_feature 1..25: note = Description of Artificial Sequence: Syntheticoligonucleotide
  source 1..25: mol_type = other RNA
aaaaattctcataggaattaaatgt

SEQ ID NO: 6112 - RNA, 25 nt, synthetic construct
  misc_feature 1..25: note = Description of Artificial Sequence: Syntheticoligonucleotide
  source 1..25: mol_type = other RNA
aaaattctcataggaattaaatgta

SEQ ID NO: 6113 - RNA, 25 nt, synthetic construct
  misc_feature 1..25: note = Description of Artificial Sequence: Syntheticoligonucleotide
  source 1..25: mol_type = other RNA
ctctttcatagtataactttaaatc

SEQ ID NO: 6114 - RNA, 25 nt, synthetic construct
  misc_feature 1..25: note = Description of Artificial Sequence: Syntheticoligonucleotide
  source 1..25: mol_type = other RNA
tcatagtataactttaaatcttttc

SEQ ID NO: 6115 - RNA, 25 nt, synthetic construct
  misc_feature 1..25: note = Description of Artificial Sequence: Syntheticoligonucleotide
  source 1..25: mol_type = other RNA
catagtataactttaaatcttttct

SEQ ID NO: 6116 - RNA, 25 nt, synthetic construct
  misc_feature 1..25: note = Description of Artificial Sequence: Syntheticoligonucleotide
  source 1..25: mol_type = other RNA
tttaaatcttttcttcaacttgagt

SEQ ID NO: 6117 - RNA, 25 nt, synthetic construct
  misc_feature 1..25: note = Description of Artificial Sequence: Syntheticoligonucleotide
  source 1..25: mol_type = other RNA
ttaaatcttttcttcaacttgagtc

SEQ ID NO: 6118 - RNA, 25 nt, synthetic construct
  misc_feature 1..25: note = Description of Artificial Sequence: Syntheticoligonucleotide
  source 1..25: mol_type = other RNA
aacttgagtctttgaagatagtttt

SEQ ID NO: 6119 - RNA, 25 nt, synthetic construct
  misc_feature 1..25: note = Description of Artificial Sequence: Syntheticoligonucleotide
  source 1..25: mol_type = other RNA
cttgagtctttgaagatagttttaa

SEQ ID NO: 6120 - RNA, 25 nt, synthetic construct
  misc_feature 1..25: note = Description of Artificial Sequence: Syntheticoligonucleotide
  source 1..25: mol_type = other RNA
ttgagtctttgaagatagttttaat

SEQ ID NO: 6121 - RNA, 25 nt, synthetic construct
  misc_feature 1..25: note = Description of Artificial Sequence: Syntheticoligonucleotide
  source 1..25: mol_type = other RNA
aagatagttttaattctgcttgtga

SEQ ID NO: 6122 - RNA, 25 nt, synthetic construct
  misc_feature 1..25: note = Description of Artificial Sequence: Syntheticoligonucleotide
  source 1..25: mol_type = other RNA
agatagttttaattctgcttgtgac

SEQ ID NO: 6123 - RNA, 25 nt, synthetic construct
  misc_feature 1..25: note = Description of Artificial Sequence: Syntheticoligonucleotide
  source 1..25: mol_type = other RNA
gatagttttaattctgcttgtgaca

SEQ ID NO: 6124 - RNA, 25 nt, synthetic construct
  misc_feature 1..25: note = Description of Artificial Sequence: Syntheticoligonucleotide
  source 1..25: mol_type = other RNA
tgcttgtgacattaaaagattattt

SEQ ID NO: 6125 - RNA, 25 nt, synthetic construct
  misc_feature 1..25: note = Description of Artificial Sequence: Syntheticoligonucleotide
  source 1..25: mol_type = other RNA
agcattgcttttgtttcttaagaaa

SEQ ID NO: 6126 - RNA, 25 nt, synthetic construct
  misc_feature 1..25: note = Description of Artificial Sequence: Syntheticoligonucleotide
  source 1..25: mol_type = other RNA
gcattgcttttgtttcttaagaaaa

SEQ ID NO: 6127 - RNA, 25 nt, synthetic construct
  misc_feature 1..25: note = Description of Artificial Sequence: Syntheticoligonucleotide
  source 1..25: mol_type = other RNA
cttttgtttcttaagaaaacaaact

SEQ ID NO: 6128 - RNA, 25 nt, synthetic construct
  misc_feature 1..25: note = Description of Artificial Sequence: Syntheticoligonucleotide
  source 1..25: mol_type = other RNA
ttcttaagaaaacaaactctttttt

SEQ ID NO: 6129 - RNA, 25 nt, synthetic construct
  misc_feature 1..25: note = Description of Artificial Sequence: Syntheticoligonucleotide
  source 1..25: mol_type = other RNA
tcttaagaaaacaaactctttttta

SEQ ID NO: 6130 - RNA, 25 nt, synthetic construct
  misc_feature 1..25: note = Description of Artificial Sequence: Syntheticoligonucleotide
  source 1..25: mol_type = other RNA
cttaagaaaacaaactcttttttaa

SEQ ID NO: 6131 - RNA, 25 nt, synthetic construct
  misc_feature 1..25: note = Description of Artificial Sequence: Syntheticoligonucleotide
  source 1..25: mol_type = other RNA
ttaagaaaacaaactcttttttaaa

SEQ ID NO: 6132 - RNA, 25 nt, synthetic construct
  misc_feature 1..25: note = Description of Artificial Sequence: Syntheticoligonucleotide
  source 1..25: mol_type = other RNA
taagaaaacaaactcttttttaaaa

SEQ ID NO: 6133 - RNA, 25 nt, synthetic construct
  misc_feature 1..25: note = Description of Artificial Sequence: Syntheticoligonucleotide
  source 1..25: mol_type = other RNA
aagaaaacaaactcttttttaaaaa

SEQ ID NO: 6134 - RNA, 25 nt, synthetic construct
  misc_feature 1..25: note = Description of Artificial Sequence: Syntheticoligonucleotide
  source 1..25: mol_type = other RNA
agaaaacaaactcttttttaaaaat

SEQ ID NO: 6135 - RNA, 25 nt, synthetic construct
  misc_feature 1..25: note = Description of Artificial Sequence: Syntheticoligonucleotide
  source 1..25: mol_type = other RNA
aacaaactcttttttaaaaattact

SEQ ID NO: 6136 - RNA, 25 nt, synthetic construct
  misc_feature 1..25: note = Description of Artificial Sequence: Syntheticoligonucleotide
  source 1..25: mol_type = other RNA
ctcttttttaaaaattacttttaaa

SEQ ID NO: 6137 - RNA, 25 nt, synthetic construct
  misc_feature 1..25: note = Description of Artificial Sequence: Syntheticoligonucleotide
  source 1..25: mol_type = other RNA
tcttttttaaaaattacttttaaat

SEQ ID NO: 6138 - RNA, 25 nt, synthetic construct
  misc_feature 1..25: note = Description of Artificial Sequence: Syntheticoligonucleotide
  source 1..25: mol_type = other RNA
cttttttaaaaattacttttaaata

SEQ ID NO: 6139 - RNA, 25 nt, synthetic construct
  misc_feature 1..25: note = Description of Artificial Sequence: Syntheticoligonucleotide
  source 1..25: mol_type = other RNA
ttttttaaaaattacttttaaatat

SEQ ID NO: 6140 - RNA, 25 nt, synthetic construct
  misc_feature 1..25: note = Description of Artificial Sequence: Syntheticoligonucleotide
  source 1..25: mol_type = other RNA
tttttaaaaattacttttaaatatt

SEQ ID NO: 6141 - RNA, 25 nt, synthetic construct
  misc_feature 1..25: note = Description of Artificial Sequence: Syntheticoligonucleotide
  source 1..25: mol_type = other RNA
ttttaaaaattacttttaaatatta

SEQ ID NO: 6142 - RNA, 25 nt, synthetic construct
  misc_feature 1..25: note = Description of Artificial Sequence: Syntheticoligonucleotide
  source 1..25: mol_type = other RNA
tttaaaaattacttttaaatattaa

SEQ ID NO: 6143 - RNA, 25 nt, synthetic construct
  misc_feature 1..25: note = Description of Artificial Sequence: Syntheticoligonucleotide
  source 1..25: mol_type = other RNA
ttaaaaattacttttaaatattaac

SEQ ID NO: 6144 - RNA, 25 nt, synthetic construct
  misc_feature 1..25: note = Description of Artificial Sequence: Syntheticoligonucleotide
  source 1..25: mol_type = other RNA
taaaaattacttttaaatattaact

SEQ ID NO: 6145 - RNA, 25 nt, synthetic construct
  misc_feature 1..25: note = Description of Artificial Sequence: Syntheticoligonucleotide
  source 1..25: mol_type = other RNA
tacttttaaatattaactcaaaagt

SEQ ID NO: 6146 - RNA, 25 nt, synthetic construct
  misc_feature 1..25: note = Description of Artificial Sequence: Syntheticoligonucleotide
  source 1..25: mol_type = other RNA
acttttaaatattaactcaaaagtt

SEQ ID NO: 6147 - RNA, 25 nt, synthetic construct
  misc_feature 1..25: note = Description of Artificial Sequence: Syntheticoligonucleotide
  source 1..25: mol_type = other RNA
ttttaaatattaactcaaaagttga

SEQ ID NO: 6148 - RNA, 25 nt, synthetic construct
  misc_feature 1..25: note = Description of Artificial Sequence: Syntheticoligonucleotide
  source 1..25: mol_type = other RNA
ttaaatattaactcaaaagttgaga

SEQ ID NO: 6149 - RNA, 25 nt, synthetic construct
  misc_feature 1..25: note = Description of Artificial Sequence: Syntheticoligonucleotide
  source 1..25: mol_type = other RNA
taaatattaactcaaaagttgagat

SEQ ID NO: 6150 - RNA, 25 nt, synthetic construct
  misc_feature 1..25: note = Description of Artificial Sequence: Syntheticoligonucleotide
  source 1..25: mol_type = other RNA
aaatattaactcaaaagttgagatt

SEQ ID NO: 6151 - RNA, 25 nt, synthetic construct
  misc_feature 1..25: note = Description of Artificial Sequence: Syntheticoligonucleotide
  source 1..25: mol_type = other RNA
aatattaactcaaaagttgagattt

SEQ ID NO: 6152 - RNA, 25 nt, synthetic construct
  misc_feature 1..25: note = Description of Artificial Sequence: Syntheticoligonucleotide
  source 1..25: mol_type = other RNA
ggtgtgccaagacattaattttttt

SEQ ID NO: 6153 - RNA, 25 nt, synthetic construct
  misc_feature 1..25: note = Description of Artificial Sequence: Syntheticoligonucleotide
  source 1..25: mol_type = other RNA
gccaagacattaattttttttttaa

SEQ ID NO: 6154 - RNA, 25 nt, synthetic construct
  misc_feature 1..25: note = Description of Artificial Sequence: Syntheticoligonucleotide
  source 1..25: mol_type = other RNA
ccaagacattaattttttttttaaa

SEQ ID NO: 6155 - RNA, 25 nt, synthetic construct
  misc_feature 1..25: note = Description of Artificial Sequence: Syntheticoligonucleotide
  source 1..25: mol_type = other RNA
cattaattttttttttaaacaatga

SEQ ID NO: 6156 - RNA, 25 nt, synthetic construct
  misc_feature 1..25: note = Description of Artificial Sequence: Syntheticoligonucleotide
  source 1..25: mol_type = other RNA
attaattttttttttaaacaatgaa

SEQ ID NO: 6157 - RNA, 25 nt, synthetic construct
  misc_feature 1..25: note = Description of Artificial Sequence: Syntheticoligonucleotide
  source 1..25: mol_type = other RNA
taattttttttttaaacaatgaagt

SEQ ID NO: 6158 - RNA, 25 nt, synthetic construct
  misc_feature 1..25: note = Description of Artificial Sequence: Syntheticoligonucleotide
  source 1..25: mol_type = other RNA
attttttttttaaacaatgaagtga

SEQ ID NO: 6159 - RNA, 25 nt, synthetic construct
  misc_feature 1..25: note = Description of Artificial Sequence: Syntheticoligonucleotide
  source 1..25: mol_type = other RNA
ttttttttttaaacaatgaagtgaa

SEQ ID NO: 6160 - RNA, 25 nt, synthetic construct
  misc_feature 1..25: note = Description of Artificial Sequence: Syntheticoligonucleotide
  source 1..25: mol_type = other RNA
tttttttttaaacaatgaagtgaaa

SEQ ID NO: 6161 - RNA, 25 nt, synthetic construct
  misc_feature 1..25: note = Description of Artificial Sequence: Syntheticoligonucleotide
  source 1..25: mol_type = other RNA
ttttttttaaacaatgaagtgaaaa

SEQ ID NO: 6162 - RNA, 25 nt, synthetic construct
  misc_feature 1..25: note = Description of Artificial Sequence: Syntheticoligonucleotide
  source 1..25: mol_type = other RNA
tttttttaaacaatgaagtgaaaaa

SEQ ID NO: 6163 - RNA, 25 nt, synthetic construct
  misc_feature 1..25: note = Description of Artificial Sequence: Syntheticoligonucleotide
  source 1..25: mol_type = other RNA
tttttaaacaatgaagtgaaaaagt

SEQ ID NO: 6164 - RNA, 25 nt, synthetic construct
  misc_feature 1..25: note = Description of Artificial Sequence: Syntheticoligonucleotide
  source 1..25: mol_type = other RNA
ttttaaacaatgaagtgaaaaagtt

SEQ ID NO: 6165 - RNA, 25 nt, synthetic construct
  misc_feature 1..25: note = Description of Artificial Sequence: Syntheticoligonucleotide
  source 1..25: mol_type = other RNA
tttaaacaatgaagtgaaaaagttt

SEQ ID NO: 6166 - RNA, 25 nt, synthetic construct
  misc_feature 1..25: note = Description of Artificial Sequence: Syntheticoligonucleotide
  source 1..25: mol_type = other RNA
atgaagtgaaaaagttttacaatct

SEQ ID NO: 6167 - RNA, 25 nt, synthetic construct
  misc_feature 1..25: note = Description of Artificial Sequence: Syntheticoligonucleotide
  source 1..25: mol_type = other RNA
tgaaaaagttttacaatctctaggt

SEQ ID NO: 6168 - RNA, 25 nt, synthetic construct
  misc_feature 1..25: note = Description of Artificial Sequence: Syntheticoligonucleotide
  source 1..25: mol_type = other RNA
gaaaaagttttacaatctctaggtt

SEQ ID NO: 6169 - RNA, 25 nt, synthetic construct
  misc_feature 1..25: note = Description of Artificial Sequence: Syntheticoligonucleotide
  source 1..25: mol_type = other RNA
aaaaagttttacaatctctaggttt

SEQ ID NO: 6170 - RNA, 25 nt, synthetic construct
  misc_feature 1..25: note = Description of Artificial Sequence: Syntheticoligonucleotide
  source 1..25: mol_type = other RNA
actggttaaattaacattgcataaa

SEQ ID NO: 6171 - RNA, 25 nt, synthetic construct
  misc_feature 1..25: note = Description of Artificial Sequence: Syntheticoligonucleotide
  source 1..25: mol_type = other RNA
ctggttaaattaacattgcataaac

SEQ ID NO: 6172 - RNA, 25 nt, synthetic construct
  misc_feature 1..25: note = Description of Artificial Sequence: Syntheticoligonucleotide
  source 1..25: mol_type = other RNA
tggttaaattaacattgcataaaca

SEQ ID NO: 6173 - RNA, 25 nt, synthetic construct
  misc_feature 1..25: note = Description of Artificial Sequence: Syntheticoligonucleotide
  source 1..25: mol_type = other RNA
acattgcataaacacttttcaagtc

SEQ ID NO: 6174 - RNA, 25 nt, synthetic construct
  misc_feature 1..25: note = Description of Artificial Sequence: Syntheticoligonucleotide
  source 1..25: mol_type = other RNA
tcaagtctgatccatatttaataat

SEQ ID NO: 6175 - RNA, 25 nt, synthetic construct
  misc_feature 1..25: note = Description of Artificial Sequence: Syntheticoligonucleotide
  source 1..25: mol_type = other RNA
tccatatttaataatgctttaaaat

SEQ ID NO: 6176 - RNA, 25 nt, synthetic construct
  misc_feature 1..25: note = Description of Artificial Sequence: Syntheticoligonucleotide
  source 1..25: mol_type = other RNA
ccatatttaataatgctttaaaata

SEQ ID NO: 6177 - RNA, 25 nt, synthetic construct
  misc_feature 1..25: note = Description of Artificial Sequence: Syntheticoligonucleotide
  source 1..25: mol_type = other RNA
catatttaataatgctttaaaataa

SEQ ID NO: 6178 - RNA, 25 nt, synthetic construct
  misc_feature 1..25: note = Description of Artificial Sequence: Syntheticoligonucleotide
  source 1..25: mol_type = other RNA
atatttaataatgctttaaaataaa

SEQ ID NO: 6179 - RNA, 25 nt, synthetic construct
  misc_feature 1..25: note = Description of Artificial Sequence: Syntheticoligonucleotide
  source 1..25: mol_type = other RNA
tatttaataatgctttaaaataaaa

SEQ ID NO: 6180 - RNA, 25 nt, synthetic construct
  misc_feature 1..25: note = Description of Artificial Sequence: Syntheticoligonucleotide
  source 1..25: mol_type = other RNA
atttaataatgctttaaaataaaaa

SEQ ID NO: 6181 - RNA, 25 nt, synthetic construct
  misc_feature 1..25: note = Description of Artificial Sequence: Syntheticoligonucleotide
  source 1..25: mol_type = other RNA
ttaataatgctttaaaataaaaata

SEQ ID NO: 6182 - RNA, 25 nt, synthetic construct
  misc_feature 1..25: note = Description of Artificial Sequence: Syntheticoligonucleotide
  source 1..25: mol_type = other RNA
taataatgctttaaaataaaaataa

SEQ ID NO: 6183 - RNA, 25 nt, synthetic construct
  misc_feature 1..25: note = Description of Artificial Sequence: Syntheticoligonucleotide
  source 1..25: mol_type = other RNA
aataatgctttaaaataaaaataaa

SEQ ID NO: 6184 - RNA, 25 nt, synthetic construct
  misc_feature 1..25: note = Description of Artificial Sequence: Syntheticoligonucleotide
  source 1..25: mol_type = other RNA
ataatgctttaaaataaaaataaaa

SEQ ID NO: 6185 - RNA, 25 nt, synthetic construct
  misc_feature 1..25: note = Description of Artificial Sequence: Syntheticoligonucleotide
  source 1..25: mol_type = other RNA
tttaaaataaaaataaaaacaatcc

SEQ ID NO: 6186 - RNA, 25 nt, synthetic construct
  misc_feature 1..25: note = Description of Artificial Sequence: Syntheticoligonucleotide
  source 1..25: mol_type = other RNA
ataaaaataaaaacaatccttttga

SEQ ID NO: 6187 - RNA, 25 nt, synthetic construct
  misc_feature 1..25: note = Description of Artificial Sequence: Syntheticoligonucleotide
  source 1..25: mol_type = other RNA
taaaaataaaaacaatccttttgat

SEQ ID NO: 6188 - RNA, 25 nt, synthetic construct
  misc_feature 1..25: note = Description of Artificial Sequence: Syntheticoligonucleotide
  source 1..25: mol_type = other RNA
aaaaataaaaacaatccttttgata

SEQ ID NO: 6189 - RNA, 25 nt, synthetic construct
  misc_feature 1..25: note = Description of Artificial Sequence: Syntheticoligonucleotide
  source 1..25: mol_type = other RNA
aaaataaaaacaatccttttgataa

SEQ ID NO: 6190 - RNA, 25 nt, synthetic construct
  misc_feature 1..25: note = Description of Artificial Sequence: Syntheticoligonucleotide
  source 1..25: mol_type = other RNA
aaataaaaacaatccttttgataaa

SEQ ID NO: 6191 - RNA, 25 nt, synthetic construct
  misc_feature 1..25: note = Description of Artificial Sequence: Syntheticoligonucleotide
  source 1..25: mol_type = other RNA
aataaaaacaatccttttgataaat

SEQ ID NO: 6192 - RNA, 25 nt, synthetic construct
  misc_feature 1..25: note = Description of Artificial Sequence: Syntheticoligonucleotide
  source 1..25: mol_type = other RNA
ataaaaacaatccttttgataaatt

SEQ ID NO: 6193 - RNA, 25 nt, synthetic construct
  misc_feature 1..25: note = Description of Artificial Sequence: Syntheticoligonucleotide
  source 1..25: mol_type = other RNA
taaaaacaatccttttgataaattt

SEQ ID NO: 6194 - RNA, 25 nt, synthetic construct
  misc_feature 1..25: note = Description of Artificial Sequence: Syntheticoligonucleotide
  source 1..25: mol_type = other RNA
aacaatccttttgataaatttaaaa

SEQ ID NO: 6195 - RNA, 25 nt, synthetic construct
  misc_feature 1..25: note = Description of Artificial Sequence: Syntheticoligonucleotide
  source 1..25: mol_type = other RNA
tccttttgataaatttaaaatgtta

SEQ ID NO: 6196 - RNA, 25 nt, synthetic construct
  misc_feature 1..25: note = Description of Artificial Sequence: Syntheticoligonucleotide
  source 1..25: mol_type = other RNA
ccttttgataaatttaaaatgttac

SEQ ID NO: 6197 - RNA, 25 nt, synthetic construct
  misc_feature 1..25: note = Description of Artificial Sequence: Syntheticoligonucleotide
  source 1..25: mol_type = other RNA
cttttgataaatttaaaatgttact

SEQ ID NO: 6198 - RNA, 25 nt, synthetic construct
  misc_feature 1..25: note = Description of Artificial Sequence: Syntheticoligonucleotide
  source 1..25: mol_type = other RNA
tgataaatttaaaatgttacttatt

SEQ ID NO: 6199 - RNA, 25 nt, synthetic construct
  misc_feature 1..25: note = Description of Artificial Sequence: Syntheticoligonucleotide
  source 1..25: mol_type = other RNA
gataaatttaaaatgttacttattt

SEQ ID NO: 6200 - RNA, 25 nt, synthetic construct
  misc_feature 1..25: note = Description of Artificial Sequence: Syntheticoligonucleotide
  source 1..25: mol_type = other RNA
ataaatttaaaatgttacttatttt

SEQ ID NO: 6201 - RNA, 25 nt, synthetic construct
  misc_feature 1..25: note = Description of Artificial Sequence: Syntheticoligonucleotide
  source 1..25: mol_type = other RNA
taaatttaaaatgttacttatttta

SEQ ID NO: 6202 - RNA, 25 nt, synthetic construct
  misc_feature 1..25: note = Description of Artificial Sequence: Syntheticoligonucleotide
  source 1..25: mol_type = other RNA
aaatttaaaatgttacttattttaa

SEQ ID NO: 6203 - RNA, 25 nt, synthetic construct
  misc_feature 1..25: note = Description of Artificial Sequence: Syntheticoligonucleotide
  source 1..25: mol_type = other RNA
aatttaaaatgttacttattttaaa

SEQ ID NO: 6204 - RNA, 25 nt, synthetic construct
  misc_feature 1..25: note = Description of Artificial Sequence: Syntheticoligonucleotide
  source 1..25: mol_type = other RNA
tttaaaatgttacttattttaaaat

SEQ ID NO: 6205 - RNA, 25 nt, synthetic construct
  misc_feature 1..25: note = Description of Artificial Sequence: Syntheticoligonucleotide
  source 1..25: mol_type = other RNA
ttaaaatgttacttattttaaaata

SEQ ID NO: 6206 - RNA, 25 nt, synthetic construct
  misc_feature 1..25: note = Description of Artificial Sequence: Syntheticoligonucleotide
  source 1..25: mol_type = other RNA
taaaatgttacttattttaaaataa

SEQ ID NO: 6207 - RNA, 25 nt, synthetic construct
  misc_feature 1..25: note = Description of Artificial Sequence: Syntheticoligonucleotide
  source 1..25: mol_type = other RNA
aaaatgttacttattttaaaataaa

SEQ ID NO: 6208 - RNA, 25 nt, synthetic construct
  misc_feature 1..25: note = Description of Artificial Sequence: Syntheticoligonucleotide
  source 1..25: mol_type = other RNA
aaatgttacttattttaaaataaat

SEQ ID NO: 6209 - RNA, 25 nt, synthetic construct
  misc_feature 1..25: note = Description of Artificial Sequence: Syntheticoligonucleotide
  source 1..25: mol_type = other RNA
atgttacttattttaaaataaatga

SEQ ID NO: 6210 - RNA, 25 nt, synthetic construct
  misc_feature 1..25: note = Description of Artificial Sequence: Syntheticoligonucleotide
  source 1..25: mol_type = other RNA
acttattttaaaataaatgaagtga

SEQ ID NO: 6211 - RNA, 25 nt, synthetic construct
  misc_feature 1..25: note = Description of Artificial Sequence: Syntheticoligonucleotide
  source 1..25: mol_type = other RNA
ttattttaaaataaatgaagtgaga

SEQ ID NO: 6212 - RNA, 25 nt, synthetic construct
  misc_feature 1..25: note = Description of Artificial Sequence: Syntheticoligonucleotide
  source 1..25: mol_type = other RNA
tattttaaaataaatgaagtgagat

SEQ ID NO: 6213 - RNA, 25 nt, synthetic construct
  misc_feature 1..25: note = Description of Artificial Sequence: Syntheticoligonucleotide
  source 1..25: mol_type = other RNA
tttaaaataaatgaagtgagatggc

SEQ ID NO: 6214 - RNA, 25 nt, synthetic construct
  misc_feature 1..25: note = Description of Artificial Sequence: Syntheticoligonucleotide
  source 1..25: mol_type = other RNA
ttaaaataaatgaagtgagatggca

SEQ ID NO: 6215 - RNA, 25 nt, synthetic construct
  misc_feature 1..25: note = Description of Artificial Sequence: Syntheticoligonucleotide
  source 1..25: mol_type = other RNA
tccatttcttcatgttaaaagaagt

SEQ ID NO: 6216 - RNA, 25 nt, synthetic construct
  misc_feature 1..25: note = Description of Artificial Sequence: Syntheticoligonucleotide
  source 1..25: mol_type = other RNA
ccatttcttcatgttaaaagaagtc

SEQ ID NO: 6217 - RNA, 25 nt, synthetic construct
  misc_feature 1..25: note = Description of Artificial Sequence: Syntheticoligonucleotide
  source 1..25: mol_type = other RNA
ctcaaactcttagtttttttttttt

SEQ ID NO: 6218 - RNA, 25 nt, synthetic construct
  misc_feature 1..25: note = Description of Artificial Sequence: Syntheticoligonucleotide
  source 1..25: mol_type = other RNA
tagttttttttttttacaactatgt

SEQ ID NO: 6219 - RNA, 25 nt, synthetic construct
  misc_feature 1..25: note = Description of Artificial Sequence: Syntheticoligonucleotide
  source 1..25: mol_type = other RNA
agttttttttttttacaactatgta

SEQ ID NO: 6220 - RNA, 25 nt, synthetic construct
  misc_feature 1..25: note = Description of Artificial Sequence: Syntheticoligonucleotide
  source 1..25: mol_type = other RNA
gttttttttttttacaactatgtaa

SEQ ID NO: 6221 - RNA, 25 nt, synthetic construct
  misc_feature 1..25: note = Description of Artificial Sequence: Syntheticoligonucleotide
  source 1..25: mol_type = other RNA
ttttttttttttacaactatgtaat

SEQ ID NO: 6222 - RNA, 25 nt, synthetic construct
  misc_feature 1..25: note = Description of Artificial Sequence: Syntheticoligonucleotide
  source 1..25: mol_type = other RNA
tttttttttttacaactatgtaatt

SEQ ID NO: 6223 - RNA, 25 nt, synthetic construct
  misc_feature 1..25: note = Description of Artificial Sequence: Syntheticoligonucleotide
  source 1..25: mol_type = other RNA
ttttttttttacaactatgtaattt

SEQ ID NO: 6224 - RNA, 25 nt, synthetic construct
  misc_feature 1..25: note = Description of Artificial Sequence: Syntheticoligonucleotide
  source 1..25: mol_type = other RNA
tttttttttacaactatgtaattta

SEQ ID NO: 6225 - RNA, 25 nt, synthetic construct
  misc_feature 1..25: note = Description of Artificial Sequence: Syntheticoligonucleotide
  source 1..25: mol_type = other RNA
ttttttttacaactatgtaatttat

SEQ ID NO: 6226 - RNA, 25 nt, synthetic construct
  misc_feature 1..25: note = Description of Artificial Sequence: Syntheticoligonucleotide
  source 1..25: mol_type = other RNA
tttttttacaactatgtaatttata

SEQ ID NO: 6227 - RNA, 25 nt, synthetic construct
  misc_feature 1..25: note = Description of Artificial Sequence: Syntheticoligonucleotide
  source 1..25: mol_type = other RNA
ttttttacaactatgtaatttatat

SEQ ID NO: 6228 - RNA, 25 nt, synthetic construct
  misc_feature 1..25: note = Description of Artificial Sequence: Syntheticoligonucleotide
  source 1..25: mol_type = other RNA
tttttacaactatgtaatttatatt

SEQ ID NO: 6229 - RNA, 25 nt, synthetic construct
  misc_feature 1..25: note = Description of Artificial Sequence: Syntheticoligonucleotide
  source 1..25: mol_type = other RNA
aactatgtaatttatattccattta

SEQ ID NO: 6230 - RNA, 25 nt, synthetic construct
  misc_feature 1..25: note = Description of Artificial Sequence: Syntheticoligonucleotide
  source 1..25: mol_type = other RNA
actatgtaatttatattccatttac

SEQ ID NO: 6231 - RNA, 25 nt, synthetic construct
  misc_feature 1..25: note = Description of Artificial Sequence: Syntheticoligonucleotide
  source 1..25: mol_type = other RNA
ctatgtaatttatattccatttaca

SEQ ID NO: 6232 - RNA, 25 nt, synthetic construct
  misc_feature 1..25: note = Description of Artificial Sequence: Syntheticoligonucleotide
  source 1..25: mol_type = other RNA
aatttatattccatttacataagga

SEQ ID NO: 6233 - RNA, 25 nt, synthetic construct
  misc_feature 1..25: note = Description of Artificial Sequence: Syntheticoligonucleotide
  source 1..25: mol_type = other RNA
atttatattccatttacataaggat

SEQ ID NO: 6234 - RNA, 25 nt, synthetic construct
  misc_feature 1..25: note = Description of Artificial Sequence: Syntheticoligonucleotide
  source 1..25: mol_type = other RNA
tttatattccatttacataaggata

SEQ ID NO: 6235 - RNA, 25 nt, synthetic construct
  misc_feature 1..25: note = Description of Artificial Sequence: Syntheticoligonucleotide
  source 1..25: mol_type = other RNA
ttatattccatttacataaggatac

SEQ ID NO: 6236 - RNA, 25 nt, synthetic construct
  misc_feature 1..25: note = Description of Artificial Sequence: Syntheticoligonucleotide
  source 1..25: mol_type = other RNA
tacataaggatacacttatttgtca

SEQ ID NO: 6237 - RNA, 25 nt, synthetic construct
  misc_feature 1..25: note = Description of Artificial Sequence: Syntheticoligonucleotide
  source 1..25: mol_type = other RNA
taaggatacacttatttgtcaagct

SEQ ID NO: 6238 - RNA, 25 nt, synthetic construct
  misc_feature 1..25: note = Description of Artificial Sequence: Syntheticoligonucleotide
  source 1..25: mol_type = other RNA
atctgtaaatttttaacctatgtta

SEQ ID NO: 6239 - RNA, 25 nt, synthetic construct
  misc_feature 1..25: note = Description of Artificial Sequence: Syntheticoligonucleotide
  source 1..25: mol_type = other RNA
tctgtaaatttttaacctatgttac

SEQ ID NO: 6240 - RNA, 25 nt, synthetic construct
  misc_feature 1..25: note = Description of Artificial Sequence: Syntheticoligonucleotide
  source 1..25: mol_type = other RNA
ctgtaaatttttaacctatgttaca

SEQ ID NO: 6241 - RNA, 25 nt, synthetic construct
  misc_feature 1..25: note = Description of Artificial Sequence: Syntheticoligonucleotide
  source 1..25: mol_type = other RNA
tgcaagaggtgaagtttatatttga

SEQ ID NO: 6242 - RNA, 25 nt, synthetic construct
  misc_feature 1..25: note = Description of Artificial Sequence: Syntheticoligonucleotide
  source 1..25: mol_type = other RNA
caagaggtgaagtttatatttgaat

SEQ ID NO: 6243 - RNA, 25 nt, synthetic construct
  misc_feature 1..25: note = Description of Artificial Sequence: Syntheticoligonucleotide
  source 1..25: mol_type = other RNA
aagaggtgaagtttatatttgaata

SEQ ID NO: 6244 - RNA, 25 nt, synthetic construct
  misc_feature 1..25: note = Description of Artificial Sequence: Syntheticoligonucleotide
  source 1..25: mol_type = other RNA
gaggtgaagtttatatttgaatatc

SEQ ID NO: 6245 - RNA, 25 nt, synthetic construct
  misc_feature 1..25: note = Description of Artificial Sequence: Syntheticoligonucleotide
  source 1..25: mol_type = other RNA
aggtgaagtttatatttgaatatcc

SEQ ID NO: 6246 - RNA, 25 nt, synthetic construct
  misc_feature 1..25: note = Description of Artificial Sequence: Syntheticoligonucleotide
  source 1..25: mol_type = other RNA
aagtttatatttgaatatccattct

SEQ ID NO: 6247 - RNA, 25 nt, synthetic construct
  misc_feature 1..25: note = Description of Artificial Sequence: Syntheticoligonucleotide
  source 1..25: mol_type = other RNA
acttgatgcagttttaatacttgta

SEQ ID NO: 6248 - RNA, 25 nt, synthetic construct
  misc_feature 1..25: note = Description of Artificial Sequence: Syntheticoligonucleotide
  source 1..25: mol_type = other RNA
ttgatgcagttttaatacttgtaat

SEQ ID NO: 6249 - RNA, 25 nt, synthetic construct
  misc_feature 1..25: note = Description of Artificial Sequence: Syntheticoligonucleotide
  source 1..25: mol_type = other RNA
gatttgacctaatcactaattttca

SEQ ID NO: 6250 - RNA, 25 nt, synthetic construct
  misc_feature 1..25: note = Description of Artificial Sequence: Syntheticoligonucleotide
  source 1..25: mol_type = other RNA
acctaatcactaattttcaggtggt

SEQ ID NO: 6251 - RNA, 25 nt, synthetic construct
  misc_feature 1..25: note = Description of Artificial Sequence: Syntheticoligonucleotide
  source 1..25: mol_type = other RNA
cagtaggatttttcaaacctggtat

SEQ ID NO: 6252 - RNA, 25 nt, synthetic construct
  misc_feature 1..25: note = Description of Artificial Sequence: Syntheticoligonucleotide
  source 1..25: mol_type = other RNA
agtggaaggagaatttaataaagat

SEQ ID NO: 6253 - RNA, 25 nt, synthetic construct
  misc_feature 1..25: note = Description of Artificial Sequence: Syntheticoligonucleotide
  source 1..25: mol_type = other RNA
ggaaggagaatttaataaagatagt

SEQ ID NO: 6254 - RNA, 25 nt, synthetic construct
  misc_feature 1..25: note = Description of Artificial Sequence: Syntheticoligonucleotide
  source 1..25: mol_type = other RNA
aaggagaatttaataaagatagtgc

SEQ ID NO: 6255 - RNA, 25 nt, synthetic construct
  misc_feature 1..25: note = Description of Artificial Sequence: Syntheticoligonucleotide
  source 1..25: mol_type = other RNA
aggagaatttaataaagatagtgct

SEQ ID NO: 6256 - RNA, 25 nt, synthetic construct
  misc_feature 1..25: note = Description of Artificial Sequence: Syntheticoligonucleotide
  source 1..25: mol_type = other RNA
gaatttaataaagatagtgctgaaa

SEQ ID NO: 6257 - RNA, 25 nt, synthetic construct
  misc_feature 1..25: note = Description of Artificial Sequence: Syntheticoligonucleotide
  source 1..25: mol_type = other RNA
tccttaggtaatctataactaggac

SEQ ID NO: 6258 - RNA, 25 nt, synthetic construct
  misc_feature 1..25: note = Description of Artificial Sequence: Syntheticoligonucleotide
  source 1..25: mol_type = other RNA
ccttaggtaatctataactaggact

SEQ ID NO: 6259 - RNA, 25 nt, synthetic construct
  misc_feature 1..25: note = Description of Artificial Sequence: Syntheticoligonucleotide
  source 1..25: mol_type = other RNA
aacagtaatacattccattgtttta

SEQ ID NO: 6260 - RNA, 25 nt, synthetic construct
  misc_feature 1..25: note = Description of Artificial Sequence: Syntheticoligonucleotide
  source 1..25: mol_type = other RNA
cagtaatacattccattgttttagt

SEQ ID NO: 6261 - RNA, 25 nt, synthetic construct
  misc_feature 1..25: note = Description of Artificial Sequence: Syntheticoligonucleotide
  source 1..25: mol_type = other RNA
agtaatacattccattgttttagta

SEQ ID NO: 6262 - RNA, 25 nt, synthetic construct
  misc_feature 1..25: note = Description of Artificial Sequence: Syntheticoligonucleotide
  source 1..25: mol_type = other RNA
gtaatacattccattgttttagtaa

SEQ ID NO: 6263 - RNA, 25 nt, synthetic construct
  misc_feature 1..25: note = Description of Artificial Sequence: Syntheticoligonucleotide
  source 1..25: mol_type = other RNA
ccattgttttagtaaccagaaatct

SEQ ID NO: 6264 - RNA, 25 nt, synthetic construct
  misc_feature 1..25: note = Description of Artificial Sequence: Syntheticoligonucleotide
  source 1..25: mol_type = other RNA
accagaaatcttcatgcaatgaaaa

SEQ ID NO: 6265 - RNA, 25 nt, synthetic construct
  misc_feature 1..25: note = Description of Artificial Sequence: Syntheticoligonucleotide
  source 1..25: mol_type = other RNA
ttcatgcaatgaaaaatactttaat

SEQ ID NO: 6266 - RNA, 25 nt, synthetic construct
  misc_feature 1..25: note = Description of Artificial Sequence: Syntheticoligonucleotide
  source 1..25: mol_type = other RNA
aatgaaaaatactttaattcatgaa

SEQ ID NO: 6267 - RNA, 25 nt, synthetic construct
  misc_feature 1..25: note = Description of Artificial Sequence: Syntheticoligonucleotide
  source 1..25: mol_type = other RNA
tgaaaaatactttaattcatgaagc

SEQ ID NO: 6268 - RNA, 25 nt, synthetic construct
  misc_feature 1..25: note = Description of Artificial Sequence: Syntheticoligonucleotide
  source 1..25: mol_type = other RNA
gaaaaatactttaattcatgaagct

SEQ ID NO: 6269 - RNA, 25 nt, synthetic construct
  misc_feature 1..25: note = Description of Artificial Sequence: Syntheticoligonucleotide
  source 1..25: mol_type = other RNA
ttcatgaagcttacttttttttttt

SEQ ID NO: 6270 - RNA, 25 nt, synthetic construct
  misc_feature 1..25: note = Description of Artificial Sequence: Syntheticoligonucleotide
  source 1..25: mol_type = other RNA
atgaagcttactttttttttttggt

SEQ ID NO: 6271 - RNA, 25 nt, synthetic construct
  misc_feature 1..25: note = Description of Artificial Sequence: Syntheticoligonucleotide
  source 1..25: mol_type = other RNA
agcttactttttttttttggtgtca

SEQ ID NO: 6272 - RNA, 25 nt, synthetic construct
  misc_feature 1..25: note = Description of Artificial Sequence: Syntheticoligonucleotide
  source 1..25: mol_type = other RNA
tactttttttttttggtgtcagagt

SEQ ID NO: 6273 - RNA, 25 nt, synthetic construct
  misc_feature 1..25: note = Description of Artificial Sequence: Syntheticoligonucleotide
  source 1..25: mol_type = other RNA
actttttttttttggtgtcagagtc

SEQ ID NO: 6274 - RNA, 25 nt, synthetic construct
  misc_feature 1..25: note = Description of Artificial Sequence: Syntheticoligonucleotide
  source 1..25: mol_type = other RNA
aactaatttttgtatttttaggaga

SEQ ID NO: 6275 - RNA, 25 nt, synthetic construct
  misc_feature 1..25: note = Description of Artificial Sequence: Syntheticoligonucleotide
  source 1..25: mol_type = other RNA
taatttttgtatttttaggagagac

SEQ ID NO: 6276 - RNA, 25 nt, synthetic construct
  misc_feature 1..25: note = Description of Artificial Sequence: Syntheticoligonucleotide
  source 1..25: mol_type = other RNA
ctcatttattcagcaaatatttatt

SEQ ID NO: 6277 - RNA, 25 nt, synthetic construct
  misc_feature 1..25: note = Description of Artificial Sequence: Syntheticoligonucleotide
  source 1..25: mol_type = other RNA
catttattcagcaaatatttattga

SEQ ID NO: 6278 - RNA, 25 nt, synthetic construct
  misc_feature 1..25: note = Description of Artificial Sequence: Syntheticoligonucleotide
  source 1..25: mol_type = other RNA
tttattcagcaaatatttattgagt

SEQ ID NO: 6279 - RNA, 25 nt, synthetic construct
  misc_feature 1..25: note = Description of Artificial Sequence: Syntheticoligonucleotide
  source 1..25: mol_type = other RNA
tattttagttttgcaaagaaggggt

SEQ ID NO: 6280 - RNA, 25 nt, synthetic construct
  misc_feature 1..25: note = Description of Artificial Sequence: Syntheticoligonucleotide
  source 1..25: mol_type = other RNA
ctctataattgttttgctacgattc

SEQ ID NO: 6281 - RNA, 25 nt, synthetic construct
  misc_feature 1..25: note = Description of Artificial Sequence: Syntheticoligonucleotide
  source 1..25: mol_type = other RNA
tactttatgtaaatcacttcattgt

SEQ ID NO: 6282 - RNA, 25 nt, synthetic construct
  misc_feature 1..25: note = Description of Artificial Sequence: Syntheticoligonucleotide
  source 1..25: mol_type = other RNA
actttatgtaaatcacttcattgtt

SEQ ID NO: 6283 - RNA, 25 nt, synthetic construct
  misc_feature 1..25: note = Description of Artificial Sequence: Syntheticoligonucleotide
  source 1..25: mol_type = other RNA
ctttatgtaaatcacttcattgttt

SEQ ID NO: 6284 - RNA, 25 nt, synthetic construct
  misc_feature 1..25: note = Description of Artificial Sequence: Syntheticoligonucleotide
  source 1..25: mol_type = other RNA
tttatgtaaatcacttcattgtttt

SEQ ID NO: 6285 - RNA, 25 nt, synthetic construct
  misc_feature 1..25: note = Description of Artificial Sequence: Syntheticoligonucleotide
  source 1..25: mol_type = other RNA
ttatgtaaatcacttcattgtttta

SEQ ID NO: 6286 - RNA, 25 nt, synthetic construct
  misc_feature 1..25: note = Description of Artificial Sequence: Syntheticoligonucleotide
  source 1..25: mol_type = other RNA
tatgtaaatcacttcattgttttaa

SEQ ID NO: 6287 - RNA, 25 nt, synthetic construct
  misc_feature 1..25: note = Description of Artificial Sequence: Syntheticoligonucleotide
  source 1..25: mol_type = other RNA
atgtaaatcacttcattgttttaaa

SEQ ID NO: 6288 - RNA, 25 nt, synthetic construct
  misc_feature 1..25: note = Description of Artificial Sequence: Syntheticoligonucleotide
  source 1..25: mol_type = other RNA
attgttttaaaggaataaacttgat

SEQ ID NO: 6289 - RNA, 25 nt, synthetic construct
  misc_feature 1..25: note = Description of Artificial Sequence: Syntheticoligonucleotide
  source 1..25: mol_type = other RNA
ttgttttaaaggaataaacttgatt

SEQ ID NO: 6290 - RNA, 25 nt, synthetic construct
  misc_feature 1..25: note = Description of Artificial Sequence: Syntheticoligonucleotide
  source 1..25: mol_type = other RNA
ttttaaaggaataaacttgattata

SEQ ID NO: 6291 - RNA, 25 nt, synthetic construct
  misc_feature 1..25: note = Description of Artificial Sequence: Syntheticoligonucleotide
  source 1..25: mol_type = other RNA
tttaaaggaataaacttgattatat

SEQ ID NO: 6292 - RNA, 25 nt, synthetic construct
  misc_feature 1..25: note = Description of Artificial Sequence: Syntheticoligonucleotide
  source 1..25: mol_type = other RNA
ttaaaggaataaacttgattatatt

SEQ ID NO: 6293 - RNA, 25 nt, synthetic construct
  misc_feature 1..25: note = Description of Artificial Sequence: Syntheticoligonucleotide
  source 1..25: mol_type = other RNA
aaaggaataaacttgattatattgt

SEQ ID NO: 6294 - RNA, 25 nt, synthetic construct
  misc_feature 1..25: note = Description of Artificial Sequence: Syntheticoligonucleotide
  source 1..25: mol_type = other RNA
aaggaataaacttgattatattgtt

SEQ ID NO: 6295 - RNA, 25 nt, synthetic construct
  misc_feature 1..25: note = Description of Artificial Sequence: Syntheticoligonucleotide
  source 1..25: mol_type = other RNA
aggaataaacttgattatattgttt

SEQ ID NO: 6296 - RNA, 25 nt, synthetic construct
  misc_feature 1..25: note = Description of Artificial Sequence: Syntheticoligonucleotide
  source 1..25: mol_type = other RNA
ggaataaacttgattatattgtttt

SEQ ID NO: 6297 - RNA, 25 nt, synthetic construct
  misc_feature 1..25: note = Description of Artificial Sequence: Syntheticoligonucleotide
  source 1..25: mol_type = other RNA
gaataaacttgattatattgttttt

SEQ ID NO: 6298 - RNA, 25 nt, synthetic construct
  misc_feature 1..25: note = Description of Artificial Sequence: Syntheticoligonucleotide
  source 1..25: mol_type = other RNA
aacttgattatattgtttttttatt

SEQ ID NO: 6299 - RNA, 25 nt, synthetic construct
  misc_feature 1..25: note = Description of Artificial Sequence: Syntheticoligonucleotide
  source 1..25: mol_type = other RNA
acttgattatattgtttttttattt

SEQ ID NO: 6300 - RNA, 25 nt, synthetic construct
  misc_feature 1..25: note = Description of Artificial Sequence: Syntheticoligonucleotide
  source 1..25: mol_type = other RNA
tgattatattgtttttttatttggc

SEQ ID NO: 6301 - RNA, 25 nt, synthetic construct
  misc_feature 1..25: note = Description of Artificial Sequence: Syntheticoligonucleotide
  source 1..25: mol_type = other RNA
atattgtttttttatttggcataac

SEQ ID NO: 6302 - RNA, 25 nt, synthetic construct
  misc_feature 1..25: note = Description of Artificial Sequence: Syntheticoligonucleotide
  source 1..25: mol_type = other RNA
tattgtttttttatttggcataact

SEQ ID NO: 6303 - RNA, 25 nt, synthetic construct
  misc_feature 1..25: note = Description of Artificial Sequence: Syntheticoligonucleotide
  source 1..25: mol_type = other RNA
gtttttttatttggcataactgtga

SEQ ID NO: 6304 - RNA, 25 nt, synthetic construct
  misc_feature 1..25: note = Description of Artificial Sequence: Syntheticoligonucleotide
  source 1..25: mol_type = other RNA
tttttttatttggcataactgtgat

SEQ ID NO: 6305 - RNA, 25 nt, synthetic construct
  misc_feature 1..25: note = Description of Artificial Sequence: Syntheticoligonucleotide
  source 1..25: mol_type = other RNA
gcataactgtgattcttttaggaca

SEQ ID NO: 6306 - RNA, 25 nt, synthetic construct
  misc_feature 1..25: note = Description of Artificial Sequence: Syntheticoligonucleotide
  source 1..25: mol_type = other RNA
actgtgattcttttaggacaattac

SEQ ID NO: 6307 - RNA, 25 nt, synthetic construct
  misc_feature 1..25: note = Description of Artificial Sequence: Syntheticoligonucleotide
  source 1..25: mol_type = other RNA
ctgtgattcttttaggacaattact

SEQ ID NO: 6308 - RNA, 25 nt, synthetic construct
  misc_feature 1..25: note = Description of Artificial Sequence: Syntheticoligonucleotide
  source 1..25: mol_type = other RNA
ggtgtatgtcagatattcatattga

SEQ ID NO: 6309 - RNA, 25 nt, synthetic construct
  misc_feature 1..25: note = Description of Artificial Sequence: Syntheticoligonucleotide
  source 1..25: mol_type = other RNA
gtgtatgtcagatattcatattgac

SEQ ID NO: 6310 - RNA, 25 nt, synthetic construct
  misc_feature 1..25: note = Description of Artificial Sequence: Syntheticoligonucleotide
  source 1..25: mol_type = other RNA
caaatgtgtaatattccagttttct

SEQ ID NO: 6311 - RNA, 25 nt, synthetic construct
  misc_feature 1..25: note = Description of Artificial Sequence: Syntheticoligonucleotide
  source 1..25: mol_type = other RNA
cataagtaattaaaatatacttaaa

SEQ ID NO: 6312 - RNA, 25 nt, synthetic construct
  misc_feature 1..25: note = Description of Artificial Sequence: Syntheticoligonucleotide
  source 1..25: mol_type = other RNA
ataagtaattaaaatatacttaaaa

SEQ ID NO: 6313 - RNA, 25 nt, synthetic construct
  misc_feature 1..25: note = Description of Artificial Sequence: Syntheticoligonucleotide
  source 1..25: mol_type = other RNA
taagtaattaaaatatacttaaaaa

SEQ ID NO: 6314 - RNA, 25 nt, synthetic construct
  misc_feature 1..25: note = Description of Artificial Sequence: Syntheticoligonucleotide
  source 1..25: mol_type = other RNA
aagtaattaaaatatacttaaaaat

SEQ ID NO: 6315 - RNA, 25 nt, synthetic construct
  misc_feature 1..25: note = Description of Artificial Sequence: Syntheticoligonucleotide
  source 1..25: mol_type = other RNA
agtaattaaaatatacttaaaaatt

SEQ ID NO: 6316 - RNA, 25 nt, synthetic construct
  misc_feature 1..25: note = Description of Artificial Sequence: Syntheticoligonucleotide
  source 1..25: mol_type = other RNA
gtaattaaaatatacttaaaaatta

SEQ ID NO: 6317 - RNA, 25 nt, synthetic construct
  misc_feature 1..25: note = Description of Artificial Sequence: Syntheticoligonucleotide
  source 1..25: mol_type = other RNA
taattaaaatatacttaaaaattaa

SEQ ID NO: 6318 - RNA, 25 nt, synthetic construct
  misc_feature 1..25: note = Description of Artificial Sequence: Syntheticoligonucleotide
  source 1..25: mol_type = other RNA
aattaaaatatacttaaaaattaat

SEQ ID NO: 6319 - RNA, 25 nt, synthetic construct
  misc_feature 1..25: note = Description of Artificial Sequence: Syntheticoligonucleotide
  source 1..25: mol_type = other RNA
attaaaatatacttaaaaattaata

SEQ ID NO: 6320 - RNA, 25 nt, synthetic construct
  misc_feature 1..25: note = Description of Artificial Sequence: Syntheticoligonucleotide
  source 1..25: mol_type = other RNA
taaaatatacttaaaaattaatagt

SEQ ID NO: 6321 - RNA, 25 nt, synthetic construct
  misc_feature 1..25: note = Description of Artificial Sequence: Syntheticoligonucleotide
  source 1..25: mol_type = other RNA
aaaatatacttaaaaattaatagtt

SEQ ID NO: 6322 - RNA, 25 nt, synthetic construct
  misc_feature 1..25: note = Description of Artificial Sequence: Syntheticoligonucleotide
  source 1..25: mol_type = other RNA
aaatatacttaaaaattaatagttt

SEQ ID NO: 6323 - RNA, 25 nt, synthetic construct
  misc_feature 1..25: note = Description of Artificial Sequence: Syntheticoligonucleotide
  source 1..25: mol_type = other RNA
aatatacttaaaaattaatagtttt

SEQ ID NO: 6324 - RNA, 25 nt, synthetic construct
  misc_feature 1..25: note = Description of Artificial Sequence: Syntheticoligonucleotide
  source 1..25: mol_type = other RNA
tacttaaaaattaatagttttatct

SEQ ID NO: 6325 - RNA, 25 nt, synthetic construct
  misc_feature 1..25: note = Description of Artificial Sequence: Syntheticoligonucleotide
  source 1..25: mol_type = other RNA
taaaaattaatagttttatctgggt

SEQ ID NO: 6326 - RNA, 25 nt, synthetic construct
  misc_feature 1..25: note = Description of Artificial Sequence: Syntheticoligonucleotide
  source 1..25: mol_type = other RNA
aaaaattaatagttttatctgggta

SEQ ID NO: 6327 - RNA, 25 nt, synthetic construct
  misc_feature 1..25: note = Description of Artificial Sequence: Syntheticoligonucleotide
  source 1..25: mol_type = other RNA
aaaattaatagttttatctgggtac

SEQ ID NO: 6328 - RNA, 25 nt, synthetic construct
  misc_feature 1..25: note = Description of Artificial Sequence: Syntheticoligonucleotide
  source 1..25: mol_type = other RNA
atctgggtacaaataaacaggtgcc

SEQ ID NO: 6329 - RNA, 25 nt, synthetic construct
  misc_feature 1..25: note = Description of Artificial Sequence: Syntheticoligonucleotide
  source 1..25: mol_type = other RNA
gacaaggaaacttctatgtaaaaat

SEQ ID NO: 6330 - RNA, 25 nt, synthetic construct
  misc_feature 1..25: note = Description of Artificial Sequence: Syntheticoligonucleotide
  source 1..25: mol_type = other RNA
acaaggaaacttctatgtaaaaatc

SEQ ID NO: 6331 - RNA, 25 nt, synthetic construct
  misc_feature 1..25: note = Description of Artificial Sequence: Syntheticoligonucleotide
  source 1..25: mol_type = other RNA
caaggaaacttctatgtaaaaatca

SEQ ID NO: 6332 - RNA, 25 nt, synthetic construct
  misc_feature 1..25: note = Description of Artificial Sequence: Syntheticoligonucleotide
  source 1..25: mol_type = other RNA
ttctatgtaaaaatcactatgattt

SEQ ID NO: 6333 - RNA, 25 nt, synthetic construct
  misc_feature 1..25: note = Description of Artificial Sequence: Syntheticoligonucleotide
  source 1..25: mol_type = other RNA
tctatgtaaaaatcactatgatttc

SEQ ID NO: 6334 - RNA, 25 nt, synthetic construct
  misc_feature 1..25: note = Description of Artificial Sequence: Syntheticoligonucleotide
  source 1..25: mol_type = other RNA
ctatgtaaaaatcactatgatttct

SEQ ID NO: 6335 - RNA, 25 nt, synthetic construct
  misc_feature 1..25: note = Description of Artificial Sequence: Syntheticoligonucleotide
  source 1..25: mol_type = other RNA
gtaaaaatcactatgatttctgaat

SEQ ID NO: 6336 - RNA, 25 nt, synthetic construct
  misc_feature 1..25: note = Description of Artificial Sequence: Syntheticoligonucleotide
  source 1..25: mol_type = other RNA
taaaaatcactatgatttctgaatt

SEQ ID NO: 6337 - RNA, 25 nt, synthetic construct
  misc_feature 1..25: note = Description of Artificial Sequence: Syntheticoligonucleotide
  source 1..25: mol_type = other RNA
ctatgatttctgaattgctatgtga

SEQ ID NO: 6338 - RNA, 25 nt, synthetic construct
  misc_feature 1..25: note = Description of Artificial Sequence: Syntheticoligonucleotide
  source 1..25: mol_type = other RNA
tatgatttctgaattgctatgtgaa

SEQ ID NO: 6339 - RNA, 25 nt, synthetic construct
  misc_feature 1..25: note = Description of Artificial Sequence: Syntheticoligonucleotide
  source 1..25: mol_type = other RNA
tatgtgaaactacagatctttggaa

SEQ ID NO: 6340 - RNA, 25 nt, synthetic construct
  misc_feature 1..25: note = Description of Artificial Sequence: Syntheticoligonucleotide
  source 1..25: mol_type = other RNA
atgtgaaactacagatctttggaac

SEQ ID NO: 6341 - RNA, 25 nt, synthetic construct
  misc_feature 1..25: note = Description of Artificial Sequence: Syntheticoligonucleotide
  source 1..25: mol_type = other RNA
agggtgttaagacttacacagtacc

SEQ ID NO: 6342 - RNA, 25 nt, synthetic construct
  misc_feature 1..25: note = Description of Artificial Sequence: Syntheticoligonucleotide
  source 1..25: mol_type = other RNA
tttaggcctcttgaatttttgatgt

SEQ ID NO: 6343 - RNA, 25 nt, synthetic construct
  misc_feature 1..25: note = Description of Artificial Sequence: Syntheticoligonucleotide
  source 1..25: mol_type = other RNA
tcttgaatttttgatgtagatgggc

SEQ ID NO: 6344 - RNA, 25 nt, synthetic construct
  misc_feature 1..25: note = Description of Artificial Sequence: Syntheticoligonucleotide
  source 1..25: mol_type = other RNA
cttgaatttttgatgtagatgggca

SEQ ID NO: 6345 - RNA, 25 nt, synthetic construct
  misc_feature 1..25: note = Description of Artificial Sequence: Syntheticoligonucleotide
  source 1..25: mol_type = other RNA
tagatgggcatttttttaaggtagt

SEQ ID NO: 6346 - RNA, 25 nt, synthetic construct
  misc_feature 1..25: note = Description of Artificial Sequence: Syntheticoligonucleotide
  source 1..25: mol_type = other RNA
ggcatttttttaaggtagtggttaa

SEQ ID NO: 6347 - RNA, 25 nt, synthetic construct
  misc_feature 1..25: note = Description of Artificial Sequence: Syntheticoligonucleotide
  source 1..25: mol_type = other RNA
aggtagtggttaattacctttatgt

SEQ ID NO: 6348 - RNA, 25 nt, synthetic construct
  misc_feature 1..25: note = Description of Artificial Sequence: Syntheticoligonucleotide
  source 1..25: mol_type = other RNA
gtagtggttaattacctttatgtga

SEQ ID NO: 6349 - RNA, 25 nt, synthetic construct
  misc_feature 1..25: note = Description of Artificial Sequence: Syntheticoligonucleotide
  source 1..25: mol_type = other RNA
tagtggttaattacctttatgtgaa

SEQ ID NO: 6350 - RNA, 25 nt, synthetic construct
  misc_feature 1..25: note = Description of Artificial Sequence: Syntheticoligonucleotide
  source 1..25: mol_type = other RNA
agtggttaattacctttatgtgaac

SEQ ID NO: 6351 - RNA, 25 nt, synthetic construct
  misc_feature 1..25: note = Description of Artificial Sequence: Syntheticoligonucleotide
  source 1..25: mol_type = other RNA
gtggttaattacctttatgtgaact

SEQ ID NO: 6352 - RNA, 25 nt, synthetic construct
  misc_feature 1..25: note = Description of Artificial Sequence: Syntheticoligonucleotide
  source 1..25: mol_type = other RNA
acctttatgtgaactttgaatggtt

SEQ ID NO: 6353 - RNA, 25 nt, synthetic construct
  misc_feature 1..25: note = Description of Artificial Sequence: Syntheticoligonucleotide
  source 1..25: mol_type = other RNA
tatgtgaactttgaatggtttaaca

SEQ ID NO: 6354 - RNA, 25 nt, synthetic construct
  misc_feature 1..25: note = Description of Artificial Sequence: Syntheticoligonucleotide
  source 1..25: mol_type = other RNA
aactttgaatggtttaacaaaagat

SEQ ID NO: 6355 - RNA, 25 nt, synthetic construct
  misc_feature 1..25: note = Description of Artificial Sequence: Syntheticoligonucleotide
  source 1..25: mol_type = other RNA
ttgaatggtttaacaaaagatttgt

SEQ ID NO: 6356 - RNA, 25 nt, synthetic construct
  misc_feature 1..25: note = Description of Artificial Sequence: Syntheticoligonucleotide
  source 1..25: mol_type = other RNA
tgaatggtttaacaaaagatttgtt

SEQ ID NO: 6357 - RNA, 25 nt, synthetic construct
  misc_feature 1..25: note = Description of Artificial Sequence: Syntheticoligonucleotide
  source 1..25: mol_type = other RNA
gaatggtttaacaaaagatttgttt

SEQ ID NO: 6358 - RNA, 25 nt, synthetic construct
  misc_feature 1..25: note = Description of Artificial Sequence: Syntheticoligonucleotide
  source 1..25: mol_type = other RNA
aatggtttaacaaaagatttgtttt

SEQ ID NO: 6359 - RNA, 25 nt, synthetic construct
  misc_feature 1..25: note = Description of Artificial Sequence: Syntheticoligonucleotide
  source 1..25: mol_type = other RNA
atggtttaacaaaagatttgttttt

SEQ ID NO: 6360 - RNA, 25 nt, synthetic construct
  misc_feature 1..25: note = Description of Artificial Sequence: Syntheticoligonucleotide
  source 1..25: mol_type = other RNA
ggtttaacaaaagatttgtttttgt

SEQ ID NO: 6361 - RNA, 25 nt, synthetic construct
  misc_feature 1..25: note = Description of Artificial Sequence: Syntheticoligonucleotide
  source 1..25: mol_type = other RNA
gtttaacaaaagatttgtttttgta

SEQ ID NO: 6362 - RNA, 25 nt, synthetic construct
  misc_feature 1..25: note = Description of Artificial Sequence: Syntheticoligonucleotide
  source 1..25: mol_type = other RNA
aacaaaagatttgtttttgtagaga

SEQ ID NO: 6363 - RNA, 25 nt, synthetic construct
  misc_feature 1..25: note = Description of Artificial Sequence: Syntheticoligonucleotide
  source 1..25: mol_type = other RNA
acaaaagatttgtttttgtagagat

SEQ ID NO: 6364 - RNA, 25 nt, synthetic construct
  misc_feature 1..25: note = Description of Artificial Sequence: Syntheticoligonucleotide
  source 1..25: mol_type = other RNA
caaaagatttgtttttgtagagatt

SEQ ID NO: 6365 - RNA, 25 nt, synthetic construct
  misc_feature 1..25: note = Description of Artificial Sequence: Syntheticoligonucleotide
  source 1..25: mol_type = other RNA
aaagatttgtttttgtagagatttt

SEQ ID NO: 6366 - RNA, 25 nt, synthetic construct
  misc_feature 1..25: note = Description of Artificial Sequence: Syntheticoligonucleotide
  source 1..25: mol_type = other RNA
aagatttgtttttgtagagatttta

SEQ ID NO: 6367 - RNA, 25 nt, synthetic construct
  misc_feature 1..25: note = Description of Artificial Sequence: Syntheticoligonucleotide
  source 1..25: mol_type = other RNA
agatttgtttttgtagagattttaa

SEQ ID NO: 6368 - RNA, 25 nt, synthetic construct
  misc_feature 1..25: note = Description of Artificial Sequence: Syntheticoligonucleotide
  source 1..25: mol_type = other RNA
gatttgtttttgtagagattttaaa

SEQ ID NO: 6369 - RNA, 25 nt, synthetic construct
  misc_feature 1..25: note = Description of Artificial Sequence: Syntheticoligonucleotide
  source 1..25: mol_type = other RNA
tttttgtagagattttaaaggggga

SEQ ID NO: 6370 - RNA, 25 nt, synthetic construct
  misc_feature 1..25: note = Description of Artificial Sequence: Syntheticoligonucleotide
  source 1..25: mol_type = other RNA
aagggggagaattctagaaataaat

SEQ ID NO: 6371 - RNA, 25 nt, synthetic construct
  misc_feature 1..25: note = Description of Artificial Sequence: Syntheticoligonucleotide
  source 1..25: mol_type = other RNA
gggggagaattctagaaataaatgt

SEQ ID NO: 6372 - RNA, 25 nt, synthetic construct
  misc_feature 1..25: note = Description of Artificial Sequence: Syntheticoligonucleotide
  source 1..25: mol_type = other RNA
ggggagaattctagaaataaatgtt

SEQ ID NO: 6373 - RNA, 25 nt, synthetic construct
  misc_feature 1..25: note = Description of Artificial Sequence: Syntheticoligonucleotide
  source 1..25: mol_type = other RNA
gggagaattctagaaataaatgtta

SEQ ID NO: 6374 - RNA, 25 nt, synthetic construct
  misc_feature 1..25: note = Description of Artificial Sequence: Syntheticoligonucleotide
  source 1..25: mol_type = other RNA
ggagaattctagaaataaatgttac

SEQ ID NO: 6375 - RNA, 25 nt, synthetic construct
  misc_feature 1..25: note = Description of Artificial Sequence: Syntheticoligonucleotide
  source 1..25: mol_type = other RNA
gagaattctagaaataaatgttacc

SEQ ID NO: 6376 - RNA, 25 nt, synthetic construct
  misc_feature 1..25: note = Description of Artificial Sequence: Syntheticoligonucleotide
  source 1..25: mol_type = other RNA
ttctagaaataaatgttacctaatt

SEQ ID NO: 6377 - RNA, 25 nt, synthetic construct
  misc_feature 1..25: note = Description of Artificial Sequence: Syntheticoligonucleotide
  source 1..25: mol_type = other RNA
tctagaaataaatgttacctaatta

SEQ ID NO: 6378 - RNA, 25 nt, synthetic construct
  misc_feature 1..25: note = Description of Artificial Sequence: Syntheticoligonucleotide
  source 1..25: mol_type = other RNA
ctagaaataaatgttacctaattat

SEQ ID NO: 6379 - RNA, 25 nt, synthetic construct
  misc_feature 1..25: note = Description of Artificial Sequence: Syntheticoligonucleotide
  source 1..25: mol_type = other RNA
tagaaataaatgttacctaattatt

SEQ ID NO: 6380 - RNA, 25 nt, synthetic construct
  misc_feature 1..25: note = Description of Artificial Sequence: Syntheticoligonucleotide
  source 1..25: mol_type = other RNA
agaaataaatgttacctaattatta

SEQ ID NO: 6381 - RNA, 25 nt, synthetic construct
  misc_feature 1..25: note = Description of Artificial Sequence: Syntheticoligonucleotide
  source 1..25: mol_type = other RNA
aaataaatgttacctaattattaca

SEQ ID NO: 6382 - RNA, 25 nt, synthetic construct
  misc_feature 1..25: note = Description of Artificial Sequence: Syntheticoligonucleotide
  source 1..25: mol_type = other RNA
acctaattattacagccttaaagac

SEQ ID NO: 6383 - RNA, 25 nt, synthetic construct
  misc_feature 1..25: note = Description of Artificial Sequence: Syntheticoligonucleotide
  source 1..25: mol_type = other RNA
cctaattattacagccttaaagaca

SEQ ID NO: 6384 - RNA, 25 nt, synthetic construct
  misc_feature 1..25: note = Description of Artificial Sequence: Syntheticoligonucleotide
  source 1..25: mol_type = other RNA
ccttaaagacaaaaatccttgttga

SEQ ID NO: 6385 - RNA, 25 nt, synthetic construct
  misc_feature 1..25: note = Description of Artificial Sequence: Syntheticoligonucleotide
  source 1..25: mol_type = other RNA
taaagacaaaaatccttgttgaagt

SEQ ID NO: 6386 - RNA, 25 nt, synthetic construct
  misc_feature 1..25: note = Description of Artificial Sequence: Syntheticoligonucleotide
  source 1..25: mol_type = other RNA
tccttgttgaagtttttttaaaaaa

SEQ ID NO: 6387 - RNA, 25 nt, synthetic construct
  misc_feature 1..25: note = Description of Artificial Sequence: Syntheticoligonucleotide
  source 1..25: mol_type = other RNA
ccttgttgaagtttttttaaaaaaa

SEQ ID NO: 6388 - RNA, 25 nt, synthetic construct
  misc_feature 1..25: note = Description of Artificial Sequence: Syntheticoligonucleotide
  source 1..25: mol_type = other RNA
ttgttgaagtttttttaaaaaaagc

SEQ ID NO: 6389 - RNA, 25 nt, synthetic construct
  misc_feature 1..25: note = Description of Artificial Sequence: Syntheticoligonucleotide
  source 1..25: mol_type = other RNA
tgttgaagtttttttaaaaaaagct

SEQ ID NO: 6390 - RNA, 25 nt, synthetic construct
  misc_feature 1..25: note = Description of Artificial Sequence: Syntheticoligonucleotide
  source 1..25: mol_type = other RNA
gaagtttttttaaaaaaagctaaat

SEQ ID NO: 6391 - RNA, 25 nt, synthetic construct
  misc_feature 1..25: note = Description of Artificial Sequence: Syntheticoligonucleotide
  source 1..25: mol_type = other RNA
aagtttttttaaaaaaagctaaatt

SEQ ID NO: 6392 - RNA, 25 nt, synthetic construct
  misc_feature 1..25: note = Description of Artificial Sequence: Syntheticoligonucleotide
  source 1..25: mol_type = other RNA
agtttttttaaaaaaagctaaatta

SEQ ID NO: 6393 - RNA, 25 nt, synthetic construct
  misc_feature 1..25: note = Description of Artificial Sequence: Syntheticoligonucleotide
  source 1..25: mol_type = other RNA
gtttttttaaaaaaagctaaattac

SEQ ID NO: 6394 - RNA, 25 nt, synthetic construct
  misc_feature 1..25: note = Description of Artificial Sequence: Syntheticoligonucleotide
  source 1..25: mol_type = other RNA
tttttttaaaaaaagctaaattaca

SEQ ID NO: 6395 - RNA, 25 nt, synthetic construct
  misc_feature 1..25: note = Description of Artificial Sequence: Syntheticoligonucleotide
  source 1..25: mol_type = other RNA
tttaaaaaaagctaaattacataga

SEQ ID NO: 6396 - RNA, 25 nt, synthetic construct
  misc_feature 1..25: note = Description of Artificial Sequence: Syntheticoligonucleotide
  source 1..25: mol_type = other RNA
taaaaaaagctaaattacatagact

SEQ ID NO: 6397 - RNA, 25 nt, synthetic construct
  misc_feature 1..25: note = Description of Artificial Sequence: Syntheticoligonucleotide
  source 1..25: mol_type = other RNA
acttaggcattaacatgtttgtgga

SEQ ID NO: 6398 - RNA, 25 nt, synthetic construct
  misc_feature 1..25: note = Description of Artificial Sequence: Syntheticoligonucleotide
  source 1..25: mol_type = other RNA
cttaggcattaacatgtttgtggaa

SEQ ID NO: 6399 - RNA, 25 nt, synthetic construct
  misc_feature 1..25: note = Description of Artificial Sequence: Syntheticoligonucleotide
  source 1..25: mol_type = other RNA
agcagacgtatattgtatcatttga

SEQ ID NO: 6400 - RNA, 25 nt, synthetic construct
  misc_feature 1..25: note = Description of Artificial Sequence: Syntheticoligonucleotide
  source 1..25: mol_type = other RNA
gacgtatattgtatcatttgagtga

SEQ ID NO: 6401 - RNA, 25 nt, synthetic construct
  misc_feature 1..25: note = Description of Artificial Sequence: Syntheticoligonucleotide
  source 1..25: mol_type = other RNA
cgtatattgtatcatttgagtgaat

SEQ ID NO: 6402 - RNA, 25 nt, synthetic construct
  misc_feature 1..25: note = Description of Artificial Sequence: Syntheticoligonucleotide
  source 1..25: mol_type = other RNA
atattgtatcatttgagtgaatgtt

SEQ ID NO: 6403 - RNA, 25 nt, synthetic construct
  misc_feature 1..25: note = Description of Artificial Sequence: Syntheticoligonucleotide
  source 1..25: mol_type = other RNA
tattgtatcatttgagtgaatgttc

SEQ ID NO: 6404 - RNA, 25 nt, synthetic construct
  misc_feature 1..25: note = Description of Artificial Sequence: Syntheticoligonucleotide
  source 1..25: mol_type = other RNA
attgtatcatttgagtgaatgttcc

SEQ ID NO: 6405 - RNA, 25 nt, synthetic construct
  misc_feature 1..25: note = Description of Artificial Sequence: Syntheticoligonucleotide
  source 1..25: mol_type = other RNA
ataggaatttagaacctaactttta

SEQ ID NO: 6406 - RNA, 25 nt, synthetic construct
  misc_feature 1..25: note = Description of Artificial Sequence: Syntheticoligonucleotide
  source 1..25: mol_type = other RNA
taggaatttagaacctaacttttat

SEQ ID NO: 6407 - RNA, 25 nt, synthetic construct
  misc_feature 1..25: note = Description of Artificial Sequence: Syntheticoligonucleotide
  source 1..25: mol_type = other RNA
aatttagaacctaacttttataggt

SEQ ID NO: 6408 - RNA, 25 nt, synthetic construct
  misc_feature 1..25: note = Description of Artificial Sequence: Syntheticoligonucleotide
  source 1..25: mol_type = other RNA
atttagaacctaacttttataggtt

SEQ ID NO: 6409 - RNA, 25 nt, synthetic construct
  misc_feature 1..25: note = Description of Artificial Sequence: Syntheticoligonucleotide
  source 1..25: mol_type = other RNA
tttagaacctaacttttataggtta

SEQ ID NO: 6410 - RNA, 25 nt, synthetic construct
  misc_feature 1..25: note = Description of Artificial Sequence: Syntheticoligonucleotide
  source 1..25: mol_type = other RNA
ttagaacctaacttttataggttat

SEQ ID NO: 6411 - RNA, 25 nt, synthetic construct
  misc_feature 1..25: note = Description of Artificial Sequence: Syntheticoligonucleotide
  source 1..25: mol_type = other RNA
ttttataggttatcaaaactgttgt

SEQ ID NO: 6412 - RNA, 25 nt, synthetic construct
  misc_feature 1..25: note = Description of Artificial Sequence: Syntheticoligonucleotide
  source 1..25: mol_type = other RNA
ttataggttatcaaaactgttgtca

SEQ ID NO: 6413 - RNA, 25 nt, synthetic construct
  misc_feature 1..25: note = Description of Artificial Sequence: Syntheticoligonucleotide
  source 1..25: mol_type = other RNA
aattttgtcctaatatatacataga

SEQ ID NO: 6414 - RNA, 25 nt, synthetic construct
  misc_feature 1..25: note = Description of Artificial Sequence: Syntheticoligonucleotide
  source 1..25: mol_type = other RNA
attttgtcctaatatatacatagaa

SEQ ID NO: 6415 - RNA, 25 nt, synthetic construct
  misc_feature 1..25: note = Description of Artificial Sequence: Syntheticoligonucleotide
  source 1..25: mol_type = other RNA
ttttgtcctaatatatacatagaaa

SEQ ID NO: 6416 - RNA, 25 nt, synthetic construct
  misc_feature 1..25: note = Description of Artificial Sequence: Syntheticoligonucleotide
  source 1..25: mol_type = other RNA
cctaatatatacatagaaactttgt

SEQ ID NO: 6417 - RNA, 25 nt, synthetic construct
  misc_feature 1..25: note = Description of Artificial Sequence: Syntheticoligonucleotide
  source 1..25: mol_type = other RNA
tatatacatagaaactttgtggggc

SEQ ID NO: 6418 - RNA, 25 nt, synthetic construct
  misc_feature 1..25: note = Description of Artificial Sequence: Syntheticoligonucleotide
  source 1..25: mol_type = other RNA
cacaagttcatctcatttgtattcc

SEQ ID NO: 6419 - RNA, 25 nt, synthetic construct
  misc_feature 1..25: note = Description of Artificial Sequence: Syntheticoligonucleotide
  source 1..25: mol_type = other RNA
ctcatttgtattccattgatttttt

SEQ ID NO: 6420 - RNA, 25 nt, synthetic construct
  misc_feature 1..25: note = Description of Artificial Sequence: Syntheticoligonucleotide
  source 1..25: mol_type = other RNA
tcatttgtattccattgattttttt

SEQ ID NO: 6421 - RNA, 25 nt, synthetic construct
  misc_feature 1..25: note = Description of Artificial Sequence: Syntheticoligonucleotide
  source 1..25: mol_type = other RNA
catttgtattccattgatttttttt

SEQ ID NO: 6422 - RNA, 25 nt, synthetic construct
  misc_feature 1..25: note = Description of Artificial Sequence: Syntheticoligonucleotide
  source 1..25: mol_type = other RNA
atttgtattccattgattttttttt

SEQ ID NO: 6423 - RNA, 25 nt, synthetic construct
  misc_feature 1..25: note = Description of Artificial Sequence: Syntheticoligonucleotide
  source 1..25: mol_type = other RNA
tttgtattccattgatttttttttt

SEQ ID NO: 6424 - RNA, 25 nt, synthetic construct
  misc_feature 1..25: note = Description of Artificial Sequence: Syntheticoligonucleotide
  source 1..25: mol_type = other RNA
ttgtattccattgattttttttttc

SEQ ID NO: 6425 - RNA, 25 nt, synthetic construct
  misc_feature 1..25: note = Description of Artificial Sequence: Syntheticoligonucleotide
  source 1..25: mol_type = other RNA
tgtattccattgattttttttttct

SEQ ID NO: 6426 - RNA, 25 nt, synthetic construct
  misc_feature 1..25: note = Description of Artificial Sequence: Syntheticoligonucleotide
  source 1..25: mol_type = other RNA
cattgattttttttttcttctaaac

SEQ ID NO: 6427 - RNA, 25 nt, synthetic construct
  misc_feature 1..25: note = Description of Artificial Sequence: Syntheticoligonucleotide
  source 1..25: mol_type = other RNA
attgattttttttttcttctaaaca

SEQ ID NO: 6428 - RNA, 25 nt, synthetic construct
  misc_feature 1..25: note = Description of Artificial Sequence: Syntheticoligonucleotide
  source 1..25: mol_type = other RNA
attttttttttcttctaaacatttt

SEQ ID NO: 6429 - RNA, 25 nt, synthetic construct
  misc_feature 1..25: note = Description of Artificial Sequence: Syntheticoligonucleotide
  source 1..25: mol_type = other RNA
ttttttttttcttctaaacattttt

SEQ ID NO: 6430 - RNA, 25 nt, synthetic construct
  misc_feature 1..25: note = Description of Artificial Sequence: Syntheticoligonucleotide
  source 1..25: mol_type = other RNA
tttttttttcttctaaacatttttt

SEQ ID NO: 6431 - RNA, 25 nt, synthetic construct
  misc_feature 1..25: note = Description of Artificial Sequence: Syntheticoligonucleotide
  source 1..25: mol_type = other RNA
ttttttttcttctaaacattttttc

SEQ ID NO: 6432 - RNA, 25 nt, synthetic construct
  misc_feature 1..25: note = Description of Artificial Sequence: Syntheticoligonucleotide
  source 1..25: mol_type = other RNA
tttttttcttctaaacattttttct

SEQ ID NO: 6433 - RNA, 25 nt, synthetic construct
  misc_feature 1..25: note = Description of Artificial Sequence: Syntheticoligonucleotide
  source 1..25: mol_type = other RNA
aacattttttcttcaaacagtatat

SEQ ID NO: 6434 - RNA, 25 nt, synthetic construct
  misc_feature 1..25: note = Description of Artificial Sequence: Syntheticoligonucleotide
  source 1..25: mol_type = other RNA
acattttttcttcaaacagtatata

SEQ ID NO: 6435 - RNA, 25 nt, synthetic construct
  misc_feature 1..25: note = Description of Artificial Sequence: Syntheticoligonucleotide
  source 1..25: mol_type = other RNA
cattttttcttcaaacagtatataa

SEQ ID NO: 6436 - RNA, 25 nt, synthetic construct
  misc_feature 1..25: note = Description of Artificial Sequence: Syntheticoligonucleotide
  source 1..25: mol_type = other RNA
attttttcttcaaacagtatataac

SEQ ID NO: 6437 - RNA, 25 nt, synthetic construct
  misc_feature 1..25: note = Description of Artificial Sequence: Syntheticoligonucleotide
  source 1..25: mol_type = other RNA
ttttttcttcaaacagtatataact

SEQ ID NO: 6438 - RNA, 25 nt, synthetic construct
  misc_feature 1..25: note = Description of Artificial Sequence: Syntheticoligonucleotide
  source 1..25: mol_type = other RNA
ttcaaacagtatataacttttttta

SEQ ID NO: 6439 - RNA, 25 nt, synthetic construct
  misc_feature 1..25: note = Description of Artificial Sequence: Syntheticoligonucleotide
  source 1..25: mol_type = other RNA
acagtatataactttttttagggga

SEQ ID NO: 6440 - RNA, 25 nt, synthetic construct
  misc_feature 1..25: note = Description of Artificial Sequence: Syntheticoligonucleotide
  source 1..25: mol_type = other RNA
cagtatataactttttttaggggat

SEQ ID NO: 6441 - RNA, 25 nt, synthetic construct
  misc_feature 1..25: note = Description of Artificial Sequence: Syntheticoligonucleotide
  source 1..25: mol_type = other RNA
agtatataactttttttaggggatt

SEQ ID NO: 6442 - RNA, 25 nt, synthetic construct
  misc_feature 1..25: note = Description of Artificial Sequence: Syntheticoligonucleotide
  source 1..25: mol_type = other RNA
gtatataactttttttaggggattt

SEQ ID NO: 6443 - RNA, 25 nt, synthetic construct
  misc_feature 1..25: note = Description of Artificial Sequence: Syntheticoligonucleotide
  source 1..25: mol_type = other RNA
aactttttttaggggattttttttt

SEQ ID NO: 6444 - RNA, 25 nt, synthetic construct
  misc_feature 1..25: note = Description of Artificial Sequence: Syntheticoligonucleotide
  source 1..25: mol_type = other RNA
actttttttaggggattttttttta

SEQ ID NO: 6445 - RNA, 25 nt, synthetic construct
  misc_feature 1..25: note = Description of Artificial Sequence: Syntheticoligonucleotide
  source 1..25: mol_type = other RNA
gggatttttttttagacagcaaaaa

SEQ ID NO: 6446 - RNA, 25 nt, synthetic construct
  misc_feature 1..25: note = Description of Artificial Sequence: Syntheticoligonucleotide
  source 1..25: mol_type = other RNA
ggatttttttttagacagcaaaaac

SEQ ID NO: 6447 - RNA, 25 nt, synthetic construct
  misc_feature 1..25: note = Description of Artificial Sequence: Syntheticoligonucleotide
  source 1..25: mol_type = other RNA
gatttttttttagacagcaaaaact

SEQ ID NO: 6448 - RNA, 25 nt, synthetic construct
  misc_feature 1..25: note = Description of Artificial Sequence: Syntheticoligonucleotide
  source 1..25: mol_type = other RNA
tgaagatttccatttgtcaaaaagt

SEQ ID NO: 6449 - RNA, 25 nt, synthetic construct
  misc_feature 1..25: note = Description of Artificial Sequence: Syntheticoligonucleotide
  source 1..25: mol_type = other RNA
gaagatttccatttgtcaaaaagta

SEQ ID NO: 6450 - RNA, 25 nt, synthetic construct
  misc_feature 1..25: note = Description of Artificial Sequence: Syntheticoligonucleotide
  source 1..25: mol_type = other RNA
aagatttccatttgtcaaaaagtaa

SEQ ID NO: 6451 - RNA, 25 nt, synthetic construct
  misc_feature 1..25: note = Description of Artificial Sequence: Syntheticoligonucleotide
  source 1..25: mol_type = other RNA
agatttccatttgtcaaaaagtaat

SEQ ID NO: 6452 - RNA, 25 nt, synthetic construct
  misc_feature 1..25: note = Description of Artificial Sequence: Syntheticoligonucleotide
  source 1..25: mol_type = other RNA
tccatttgtcaaaaagtaatgattt

SEQ ID NO: 6453 - RNA, 25 nt, synthetic construct
  misc_feature 1..25: note = Description of Artificial Sequence: Syntheticoligonucleotide
  source 1..25: mol_type = other RNA
ccatttgtcaaaaagtaatgatttc

SEQ ID NO: 6454 - RNA, 25 nt, synthetic construct
  misc_feature 1..25: note = Description of Artificial Sequence: Syntheticoligonucleotide
  source 1..25: mol_type = other RNA
catttgtcaaaaagtaatgatttct

SEQ ID NO: 6455 - RNA, 25 nt, synthetic construct
  misc_feature 1..25: note = Description of Artificial Sequence: Syntheticoligonucleotide
  source 1..25: mol_type = other RNA
gtcaaaaagtaatgatttcttgata

SEQ ID NO: 6456 - RNA, 25 nt, synthetic construct
  misc_feature 1..25: note = Description of Artificial Sequence: Syntheticoligonucleotide
  source 1..25: mol_type = other RNA
tcaaaaagtaatgatttcttgataa

SEQ ID NO: 6457 - RNA, 25 nt, synthetic construct
  misc_feature 1..25: note = Description of Artificial Sequence: Syntheticoligonucleotide
  source 1..25: mol_type = other RNA
caaaaagtaatgatttcttgataat

SEQ ID NO: 6458 - RNA, 25 nt, synthetic construct
  misc_feature 1..25: note = Description of Artificial Sequence: Syntheticoligonucleotide
  source 1..25: mol_type = other RNA
aaaaagtaatgatttcttgataatt

SEQ ID NO: 6459 - RNA, 25 nt, synthetic construct
  misc_feature 1..25: note = Description of Artificial Sequence: Syntheticoligonucleotide
  source 1..25: mol_type = other RNA
aaagtaatgatttcttgataattgt

SEQ ID NO: 6460 - RNA, 25 nt, synthetic construct
  misc_feature 1..25: note = Description of Artificial Sequence: Syntheticoligonucleotide
  source 1..25: mol_type = other RNA
agtaatgatttcttgataattgtgt

SEQ ID NO: 6461 - RNA, 25 nt, synthetic construct
  misc_feature 1..25: note = Description of Artificial Sequence: Syntheticoligonucleotide
  source 1..25: mol_type = other RNA
gtaatgatttcttgataattgtgta

SEQ ID NO: 6462 - RNA, 25 nt, synthetic construct
  misc_feature 1..25: note = Description of Artificial Sequence: Syntheticoligonucleotide
  source 1..25: mol_type = other RNA
aatgatttcttgataattgtgtagt

SEQ ID NO: 6463 - RNA, 25 nt, synthetic construct
  misc_feature 1..25: note = Description of Artificial Sequence: Syntheticoligonucleotide
  source 1..25: mol_type = other RNA
atgatttcttgataattgtgtagta

SEQ ID NO: 6464 - RNA, 25 nt, synthetic construct
  misc_feature 1..25: note = Description of Artificial Sequence: Syntheticoligonucleotide
  source 1..25: mol_type = other RNA
ttcttgataattgtgtagtaatgtt

SEQ ID NO: 6465 - RNA, 25 nt, synthetic construct
  misc_feature 1..25: note = Description of Artificial Sequence: Syntheticoligonucleotide
  source 1..25: mol_type = other RNA
tcttgataattgtgtagtaatgttt

SEQ ID NO: 6466 - RNA, 25 nt, synthetic construct
  misc_feature 1..25: note = Description of Artificial Sequence: Syntheticoligonucleotide
  source 1..25: mol_type = other RNA
cttgataattgtgtagtaatgtttt

SEQ ID NO: 6467 - RNA, 25 nt, synthetic construct
  misc_feature 1..25: note = Description of Artificial Sequence: Syntheticoligonucleotide
  source 1..25: mol_type = other RNA
tgataattgtgtagtaatgtttttt

SEQ ID NO: 6468 - RNA, 25 nt, synthetic construct
  misc_feature 1..25: note = Description of Artificial Sequence: Syntheticoligonucleotide
  source 1..25: mol_type = other RNA
taattgtgtagtaatgttttttaga

SEQ ID NO: 6469 - RNA, 25 nt, synthetic construct
  misc_feature 1..25: note = Description of Artificial Sequence: Syntheticoligonucleotide
  source 1..25: mol_type = other RNA
attgtgtagtaatgttttttagaac

SEQ ID NO: 6470 - RNA, 25 nt, synthetic construct
  misc_feature 1..25: note = Description of Artificial Sequence: Syntheticoligonucleotide
  source 1..25: mol_type = other RNA
ttgtgtagtaatgttttttagaacc

SEQ ID NO: 6471 - RNA, 25 nt, synthetic construct
  misc_feature 1..25: note = Description of Artificial Sequence: Syntheticoligonucleotide
  source 1..25: mol_type = other RNA
ccttaaagctgaatttatatttagt

SEQ ID NO: 6472 - RNA, 25 nt, synthetic construct
  misc_feature 1..25: note = Description of Artificial Sequence: Syntheticoligonucleotide
  source 1..25: mol_type = other RNA
ttaaagctgaatttatatttagtaa

SEQ ID NO: 6473 - RNA, 25 nt, synthetic construct
  misc_feature 1..25: note = Description of Artificial Sequence: Syntheticoligonucleotide
  source 1..25: mol_type = other RNA
aatttatatttagtaacttctgtgt

SEQ ID NO: 6474 - RNA, 25 nt, synthetic construct
  misc_feature 1..25: note = Description of Artificial Sequence: Syntheticoligonucleotide
  source 1..25: mol_type = other RNA
atttatatttagtaacttctgtgtt

SEQ ID NO: 6475 - RNA, 25 nt, synthetic construct
  misc_feature 1..25: note = Description of Artificial Sequence: Syntheticoligonucleotide
  source 1..25: mol_type = other RNA
tttatatttagtaacttctgtgtta

SEQ ID NO: 6476 - RNA, 25 nt, synthetic construct
  misc_feature 1..25: note = Description of Artificial Sequence: Syntheticoligonucleotide
  source 1..25: mol_type = other RNA
atttagtaacttctgtgttaatact

SEQ ID NO: 6477 - RNA, 25 nt, synthetic construct
  misc_feature 1..25: note = Description of Artificial Sequence: Syntheticoligonucleotide
  source 1..25: mol_type = other RNA
actgaatagctgtcataaaatgaaa

SEQ ID NO: 6478 - RNA, 25 nt, synthetic construct
  misc_feature 1..25: note = Description of Artificial Sequence: Syntheticoligonucleotide
  source 1..25: mol_type = other RNA
ctgaatagctgtcataaaatgaaac

SEQ ID NO: 6479 - RNA, 25 nt, synthetic construct
  misc_feature 1..25: note = Description of Artificial Sequence: Syntheticoligonucleotide
  source 1..25: mol_type = other RNA
taaaatgaaactttctttctaaaga

SEQ ID NO: 6480 - RNA, 25 nt, synthetic construct
  misc_feature 1..25: note = Description of Artificial Sequence: Syntheticoligonucleotide
  source 1..25: mol_type = other RNA
aaaatgaaactttctttctaaagaa

SEQ ID NO: 6481 - RNA, 25 nt, synthetic construct
  misc_feature 1..25: note = Description of Artificial Sequence: Syntheticoligonucleotide
  source 1..25: mol_type = other RNA
aaatgaaactttctttctaaagaaa

SEQ ID NO: 6482 - RNA, 25 nt, synthetic construct
  misc_feature 1..25: note = Description of Artificial Sequence: Syntheticoligonucleotide
  source 1..25: mol_type = other RNA
atgaaactttctttctaaagaaaga

SEQ ID NO: 6483 - RNA, 25 nt, synthetic construct
  misc_feature 1..25: note = Description of Artificial Sequence: Syntheticoligonucleotide
  source 1..25: mol_type = other RNA
aactttctttctaaagaaagatact

SEQ ID NO: 6484 - RNA, 25 nt, synthetic construct
  misc_feature 1..25: note = Description of Artificial Sequence: Syntheticoligonucleotide
  source 1..25: mol_type = other RNA
cacatgagttcttgaagaatagtca

SEQ ID NO: 6485 - RNA, 25 nt, synthetic construct
  misc_feature 1..25: note = Description of Artificial Sequence: Syntheticoligonucleotide
  source 1..25: mol_type = other RNA
tcttgaagaatagtcataactagat

SEQ ID NO: 6486 - RNA, 25 nt, synthetic construct
  misc_feature 1..25: note = Description of Artificial Sequence: Syntheticoligonucleotide
  source 1..25: mol_type = other RNA
cttgaagaatagtcataactagatt

SEQ ID NO: 6487 - RNA, 25 nt, synthetic construct
  misc_feature 1..25: note = Description of Artificial Sequence: Syntheticoligonucleotide
  source 1..25: mol_type = other RNA
ttgaagaatagtcataactagatta

SEQ ID NO: 6488 - RNA, 25 nt, synthetic construct
  misc_feature 1..25: note = Description of Artificial Sequence: Syntheticoligonucleotide
  source 1..25: mol_type = other RNA
aagaatagtcataactagattaaga

SEQ ID NO: 6489 - RNA, 25 nt, synthetic construct
  misc_feature 1..25: note = Description of Artificial Sequence: Syntheticoligonucleotide
  source 1..25: mol_type = other RNA
agaatagtcataactagattaagat

SEQ ID NO: 6490 - RNA, 25 nt, synthetic construct
  misc_feature 1..25: note = Description of Artificial Sequence: Syntheticoligonucleotide
  source 1..25: mol_type = other RNA
gaatagtcataactagattaagatc

SEQ ID NO: 6491 - RNA, 25 nt, synthetic construct
  misc_feature 1..25: note = Description of Artificial Sequence: Syntheticoligonucleotide
  source 1..25: mol_type = other RNA
aatagtcataactagattaagatct

SEQ ID NO: 6492 - RNA, 25 nt, synthetic construct
  misc_feature 1..25: note = Description of Artificial Sequence: Syntheticoligonucleotide
  source 1..25: mol_type = other RNA
gtcataactagattaagatctgtgt

SEQ ID NO: 6493 - RNA, 25 nt, synthetic construct
  misc_feature 1..25: note = Description of Artificial Sequence: Syntheticoligonucleotide
  source 1..25: mol_type = other RNA
actagattaagatctgtgttttagt

SEQ ID NO: 6494 - RNA, 25 nt, synthetic construct
  misc_feature 1..25: note = Description of Artificial Sequence: Syntheticoligonucleotide
  source 1..25: mol_type = other RNA
tagattaagatctgtgttttagttt

SEQ ID NO: 6495 - RNA, 25 nt, synthetic construct
  misc_feature 1..25: note = Description of Artificial Sequence: Syntheticoligonucleotide
  source 1..25: mol_type = other RNA
agattaagatctgtgttttagttta

SEQ ID NO: 6496 - RNA, 25 nt, synthetic construct
  misc_feature 1..25: note = Description of Artificial Sequence: Syntheticoligonucleotide
  source 1..25: mol_type = other RNA
attaagatctgtgttttagtttaat

SEQ ID NO: 6497 - RNA, 25 nt, synthetic construct
  misc_feature 1..25: note = Description of Artificial Sequence: Syntheticoligonucleotide
  source 1..25: mol_type = other RNA
tctgtgttttagtttaatagtttga

SEQ ID NO: 6498 - RNA, 25 nt, synthetic construct
  misc_feature 1..25: note = Description of Artificial Sequence: Syntheticoligonucleotide
  source 1..25: mol_type = other RNA
ctgtgttttagtttaatagtttgaa

SEQ ID NO: 6499 - RNA, 25 nt, synthetic construct
  misc_feature 1..25: note = Description of Artificial Sequence: Syntheticoligonucleotide
  source 1..25: mol_type = other RNA
gtgttttagtttaatagtttgaagt

SEQ ID NO: 6500 - RNA, 25 nt, synthetic construct
  misc_feature 1..25: note = Description of Artificial Sequence: Syntheticoligonucleotide
  source 1..25: mol_type = other RNA
gttttagtttaatagtttgaagtgc

SEQ ID NO: 6501 - RNA, 25 nt, synthetic construct
  misc_feature 1..25: note = Description of Artificial Sequence: Syntheticoligonucleotide
  source 1..25: mol_type = other RNA
ttttagtttaatagtttgaagtgcc

SEQ ID NO: 6502 - RNA, 25 nt, synthetic construct
  misc_feature 1..25: note = Description of Artificial Sequence: Syntheticoligonucleotide
  source 1..25: mol_type = other RNA
gtttgggataatgataggtaattta

SEQ ID NO: 6503 - RNA, 25 nt, synthetic construct
  misc_feature 1..25: note = Description of Artificial Sequence: Syntheticoligonucleotide
  source 1..25: mol_type = other RNA
ttgggataatgataggtaatttaga

SEQ ID NO: 6504 - RNA, 25 nt, synthetic construct
  misc_feature 1..25: note = Description of Artificial Sequence: Syntheticoligonucleotide
  source 1..25: mol_type = other RNA
ggataatgataggtaatttagatga

SEQ ID NO: 6505 - RNA, 25 nt, synthetic construct
  misc_feature 1..25: note = Description of Artificial Sequence: Syntheticoligonucleotide
  source 1..25: mol_type = other RNA
gataatgataggtaatttagatgaa

SEQ ID NO: 6506 - RNA, 25 nt, synthetic construct
  misc_feature 1..25: note = Description of Artificial Sequence: Syntheticoligonucleotide
  source 1..25: mol_type = other RNA
aatgataggtaatttagatgaattt

SEQ ID NO: 6507 - RNA, 25 nt, synthetic construct
  misc_feature 1..25: note = Description of Artificial Sequence: Syntheticoligonucleotide
  source 1..25: mol_type = other RNA
atgataggtaatttagatgaattta

SEQ ID NO: 6508 - RNA, 25 nt, synthetic construct
  misc_feature 1..25: note = Description of Artificial Sequence: Syntheticoligonucleotide
  source 1..25: mol_type = other RNA
aggtaatttagatgaatttagggga

SEQ ID NO: 6509 - RNA, 25 nt, synthetic construct
  misc_feature 1..25: note = Description of Artificial Sequence: Syntheticoligonucleotide
  source 1..25: mol_type = other RNA
gtaatttagatgaatttaggggaaa

SEQ ID NO: 6510 - RNA, 25 nt, synthetic construct
  misc_feature 1..25: note = Description of Artificial Sequence: Syntheticoligonucleotide
  source 1..25: mol_type = other RNA
agatgaatttaggggaaaaaaaagt

SEQ ID NO: 6511 - RNA, 25 nt, synthetic construct
  misc_feature 1..25: note = Description of Artificial Sequence: Syntheticoligonucleotide
  source 1..25: mol_type = other RNA
gatgaatttaggggaaaaaaaagtt

SEQ ID NO: 6512 - RNA, 25 nt, synthetic construct
  misc_feature 1..25: note = Description of Artificial Sequence: Syntheticoligonucleotide
  source 1..25: mol_type = other RNA
gggaaaaaaaagttatctgcagata

SEQ ID NO: 6513 - RNA, 25 nt, synthetic construct
  misc_feature 1..25: note = Description of Artificial Sequence: Syntheticoligonucleotide
  source 1..25: mol_type = other RNA
ggaaaaaaaagttatctgcagatat

SEQ ID NO: 6514 - RNA, 25 nt, synthetic construct
  misc_feature 1..25: note = Description of Artificial Sequence: Syntheticoligonucleotide
  source 1..25: mol_type = other RNA
aaaaagttatctgcagatatgttga

SEQ ID NO: 6515 - RNA, 25 nt, synthetic construct
  misc_feature 1..25: note = Description of Artificial Sequence: Syntheticoligonucleotide
  source 1..25: mol_type = other RNA
gtcttgtgttttcatgttgaaaata

SEQ ID NO: 6516 - RNA, 25 nt, synthetic construct
  misc_feature 1..25: note = Description of Artificial Sequence: Syntheticoligonucleotide
  source 1..25: mol_type = other RNA
tcttgtgttttcatgttgaaaatac

SEQ ID NO: 6517 - RNA, 25 nt, synthetic construct
  misc_feature 1..25: note = Description of Artificial Sequence: Syntheticoligonucleotide
  source 1..25: mol_type = other RNA
cttgtgttttcatgttgaaaatact

SEQ ID NO: 6518 - RNA, 25 nt, synthetic construct
  misc_feature 1..25: note = Description of Artificial Sequence: Syntheticoligonucleotide
  source 1..25: mol_type = other RNA
catgttgaaaatacttttgcatttt

SEQ ID NO: 6519 - RNA, 25 nt, synthetic construct
  misc_feature 1..25: note = Description of Artificial Sequence: Syntheticoligonucleotide
  source 1..25: mol_type = other RNA
atgttgaaaatacttttgcattttt

SEQ ID NO: 6520 - RNA, 25 nt, synthetic construct
  misc_feature 1..25: note = Description of Artificial Sequence: Syntheticoligonucleotide
  source 1..25: mol_type = other RNA
tgttgaaaatacttttgcatttttc

SEQ ID NO: 6521 - RNA, 25 nt, synthetic construct
  misc_feature 1..25: note = Description of Artificial Sequence: Syntheticoligonucleotide
  source 1..25: mol_type = other RNA
gttgaaaatacttttgcatttttcc

SEQ ID NO: 6522 - RNA, 25 nt, synthetic construct
  misc_feature 1..25: note = Description of Artificial Sequence: Syntheticoligonucleotide
  source 1..25: mol_type = other RNA
cttttgcatttttcctttgagtgcc

SEQ ID NO: 6523 - RNA, 25 nt, synthetic construct
  misc_feature 1..25: note = Description of Artificial Sequence: Syntheticoligonucleotide
  source 1..25: mol_type = other RNA
tgagtgccaatttcttactagtact

SEQ ID NO: 6524 - RNA, 25 nt, synthetic construct
  misc_feature 1..25: note = Description of Artificial Sequence: Syntheticoligonucleotide
  source 1..25: mol_type = other RNA
gccaatttcttactagtactatttc

SEQ ID NO: 6525 - RNA, 25 nt, synthetic construct
  misc_feature 1..25: note = Description of Artificial Sequence: Syntheticoligonucleotide
  source 1..25: mol_type = other RNA
ccaatttcttactagtactatttct

SEQ ID NO: 6526 - RNA, 25 nt, synthetic construct
  misc_feature 1..25: note = Description of Artificial Sequence: Syntheticoligonucleotide
  source 1..25: mol_type = other RNA
tactagtactatttcttaatgtaac

SEQ ID NO: 6527 - RNA, 25 nt, synthetic construct
  misc_feature 1..25: note = Description of Artificial Sequence: Syntheticoligonucleotide
  source 1..25: mol_type = other RNA
actagtactatttcttaatgtaaca

SEQ ID NO: 6528 - RNA, 25 nt, synthetic construct
  misc_feature 1..25: note = Description of Artificial Sequence: Syntheticoligonucleotide
  source 1..25: mol_type = other RNA
tactatttcttaatgtaacatgttt

SEQ ID NO: 6529 - RNA, 25 nt, synthetic construct
  misc_feature 1..25: note = Description of Artificial Sequence: Syntheticoligonucleotide
  source 1..25: mol_type = other RNA
actatttcttaatgtaacatgttta

SEQ ID NO: 6530 - RNA, 25 nt, synthetic construct
  misc_feature 1..25: note = Description of Artificial Sequence: Syntheticoligonucleotide
  source 1..25: mol_type = other RNA
ctatttcttaatgtaacatgtttac

SEQ ID NO: 6531 - RNA, 25 nt, synthetic construct
  misc_feature 1..25: note = Description of Artificial Sequence: Syntheticoligonucleotide
  source 1..25: mol_type = other RNA
ttaatgtaacatgtttacctggaat

SEQ ID NO: 6532 - RNA, 25 nt, synthetic construct
  misc_feature 1..25: note = Description of Artificial Sequence: Syntheticoligonucleotide
  source 1..25: mol_type = other RNA
cctggaatgtattttaactattttt

SEQ ID NO: 6533 - RNA, 25 nt, synthetic construct
  misc_feature 1..25: note = Description of Artificial Sequence: Syntheticoligonucleotide
  source 1..25: mol_type = other RNA
tggaatgtattttaactatttttgt

SEQ ID NO: 6534 - RNA, 25 nt, synthetic construct
  misc_feature 1..25: note = Description of Artificial Sequence: Syntheticoligonucleotide
  source 1..25: mol_type = other RNA
ggaatgtattttaactatttttgta

SEQ ID NO: 6535 - RNA, 25 nt, synthetic construct
  misc_feature 1..25: note = Description of Artificial Sequence: Syntheticoligonucleotide
  source 1..25: mol_type = other RNA
gaatgtattttaactatttttgtat

SEQ ID NO: 6536 - RNA, 25 nt, synthetic construct
  misc_feature 1..25: note = Description of Artificial Sequence: Syntheticoligonucleotide
  source 1..25: mol_type = other RNA
aatgtattttaactatttttgtata

SEQ ID NO: 6537 - RNA, 25 nt, synthetic construct
  misc_feature 1..25: note = Description of Artificial Sequence: Syntheticoligonucleotide
  source 1..25: mol_type = other RNA
tgtattttaactatttttgtatagt

SEQ ID NO: 6538 - RNA, 25 nt, synthetic construct
  misc_feature 1..25: note = Description of Artificial Sequence: Syntheticoligonucleotide
  source 1..25: mol_type = other RNA
tattttaactatttttgtatagtgt

SEQ ID NO: 6539 - RNA, 25 nt, synthetic construct
  misc_feature 1..25: note = Description of Artificial Sequence: Syntheticoligonucleotide
  source 1..25: mol_type = other RNA
attttaactatttttgtatagtgta

SEQ ID NO: 6540 - RNA, 25 nt, synthetic construct
  misc_feature 1..25: note = Description of Artificial Sequence: Syntheticoligonucleotide
  source 1..25: mol_type = other RNA
ttttaactatttttgtatagtgtaa

SEQ ID NO: 6541 - RNA, 25 nt, synthetic construct
  misc_feature 1..25: note = Description of Artificial Sequence: Syntheticoligonucleotide
  source 1..25: mol_type = other RNA
tatttttgtatagtgtaaactgaaa

SEQ ID NO: 6542 - RNA, 25 nt, synthetic construct
  misc_feature 1..25: note = Description of Artificial Sequence: Syntheticoligonucleotide
  source 1..25: mol_type = other RNA
atttttgtatagtgtaaactgaaac

SEQ ID NO: 6543 - RNA, 25 nt, synthetic construct
  misc_feature 1..25: note = Description of Artificial Sequence: Syntheticoligonucleotide
  source 1..25: mol_type = other RNA
tttttgtatagtgtaaactgaaaca

SEQ ID NO: 6544 - RNA, 25 nt, synthetic construct
  misc_feature 1..25: note = Description of Artificial Sequence: Syntheticoligonucleotide
  source 1..25: mol_type = other RNA
aactgaaacatgcacattttgtaca

SEQ ID NO: 6545 - RNA, 25 nt, synthetic construct
  misc_feature 1..25: note = Description of Artificial Sequence: Syntheticoligonucleotide
  source 1..25: mol_type = other RNA
aacatgcacattttgtacattgtgc

SEQ ID NO: 6546 - RNA, 25 nt, synthetic construct
  misc_feature 1..25: note = Description of Artificial Sequence: Syntheticoligonucleotide
  source 1..25: mol_type = other RNA
tccagttgttttccatcatttggtt

SEQ ID NO: 6547 - RNA, 25 nt, synthetic construct
  misc_feature 1..25: note = Description of Artificial Sequence: Syntheticoligonucleotide
  source 1..25: mol_type = other RNA
cagttgttttccatcatttggttgc

SEQ ID NO: 6548 - RNA, 25 nt, synthetic construct
  misc_feature 1..25: note = Description of Artificial Sequence: Syntheticoligonucleotide
  source 1..25: mol_type = other RNA
atgttggtcatatcaaacattaaaa

SEQ ID NO: 6549 - RNA, 25 nt, synthetic construct
  misc_feature 1..25: note = Description of Artificial Sequence: Syntheticoligonucleotide
  source 1..25: mol_type = other RNA
tgttggtcatatcaaacattaaaaa

SEQ ID NO: 6550 - RNA, 25 nt, synthetic construct
  misc_feature 1..25: note = Description of Artificial Sequence: Syntheticoligonucleotide
  source 1..25: mol_type = other RNA
gttggtcatatcaaacattaaaaat

SEQ ID NO: 6551 - RNA, 25 nt, synthetic construct
  misc_feature 1..25: note = Description of Artificial Sequence: Syntheticoligonucleotide
  source 1..25: mol_type = other RNA
gtcatatcaaacattaaaaatgacc

SEQ ID NO: 6552 - RNA, 25 nt, synthetic construct
  misc_feature 1..25: note = Description of Artificial Sequence: Syntheticoligonucleotide
  source 1..25: mol_type = other RNA
aaaatgaccactcttttaattgaaa

SEQ ID NO: 6553 - RNA, 25 nt, synthetic construct
  misc_feature 1..25: note = Description of Artificial Sequence: Syntheticoligonucleotide
  source 1..25: mol_type = other RNA
aaatgaccactcttttaattgaaat

SEQ ID NO: 6554 - RNA, 25 nt, synthetic construct
  misc_feature 1..25: note = Description of Artificial Sequence: Syntheticoligonucleotide
  source 1..25: mol_type = other RNA
ctcttttaattgaaattaactttta

SEQ ID NO: 6555 - RNA, 25 nt, synthetic construct
  misc_feature 1..25: note = Description of Artificial Sequence: Syntheticoligonucleotide
  source 1..25: mol_type = other RNA
tcttttaattgaaattaacttttaa

SEQ ID NO: 6556 - RNA, 25 nt, synthetic construct
  misc_feature 1..25: note = Description of Artificial Sequence: Syntheticoligonucleotide
  source 1..25: mol_type = other RNA
ttttaattgaaattaacttttaaat

SEQ ID NO: 6557 - RNA, 25 nt, synthetic construct
  misc_feature 1..25: note = Description of Artificial Sequence: Syntheticoligonucleotide
  source 1..25: mol_type = other RNA
ttaattgaaattaacttttaaatgt

SEQ ID NO: 6558 - RNA, 25 nt, synthetic construct
  misc_feature 1..25: note = Description of Artificial Sequence: Syntheticoligonucleotide
  source 1..25: mol_type = other RNA
taattgaaattaacttttaaatgtt

SEQ ID NO: 6559 - RNA, 25 nt, synthetic construct
  misc_feature 1..25: note = Description of Artificial Sequence: Syntheticoligonucleotide
  source 1..25: mol_type = other RNA
aattgaaattaacttttaaatgttt

SEQ ID NO: 6560 - RNA, 25 nt, synthetic construct
  misc_feature 1..25: note = Description of Artificial Sequence: Syntheticoligonucleotide
  source 1..25: mol_type = other RNA
attgaaattaacttttaaatgttta

SEQ ID NO: 6561 - RNA, 25 nt, synthetic construct
  misc_feature 1..25: note = Description of Artificial Sequence: Syntheticoligonucleotide
  source 1..25: mol_type = other RNA
ttgaaattaacttttaaatgtttat

SEQ ID NO: 6562 - RNA, 25 nt, synthetic construct
  misc_feature 1..25: note = Description of Artificial Sequence: Syntheticoligonucleotide
  source 1..25: mol_type = other RNA
tgaaattaacttttaaatgtttata

SEQ ID NO: 6563 - RNA, 25 nt, synthetic construct
  misc_feature 1..25: note = Description of Artificial Sequence: Syntheticoligonucleotide
  source 1..25: mol_type = other RNA
aattaacttttaaatgtttatagga

SEQ ID NO: 6564 - RNA, 25 nt, synthetic construct
  misc_feature 1..25: note = Description of Artificial Sequence: Syntheticoligonucleotide
  source 1..25: mol_type = other RNA
aacttttaaatgtttataggagtat

SEQ ID NO: 6565 - RNA, 25 nt, synthetic construct
  misc_feature 1..25: note = Description of Artificial Sequence: Syntheticoligonucleotide
  source 1..25: mol_type = other RNA
tttaaatgtttataggagtatgtgc

SEQ ID NO: 6566 - RNA, 25 nt, synthetic construct
  misc_feature 1..25: note = Description of Artificial Sequence: Syntheticoligonucleotide
  source 1..25: mol_type = other RNA
ttaaatgtttataggagtatgtgct

SEQ ID NO: 6567 - RNA, 25 nt, synthetic construct
  misc_feature 1..25: note = Description of Artificial Sequence: Syntheticoligonucleotide
  source 1..25: mol_type = other RNA
gctgtgaagtgatctaaaatttgta

SEQ ID NO: 6568 - RNA, 25 nt, synthetic construct
  misc_feature 1..25: note = Description of Artificial Sequence: Syntheticoligonucleotide
  source 1..25: mol_type = other RNA
tgtgaagtgatctaaaatttgtaat

SEQ ID NO: 6569 - RNA, 25 nt, synthetic construct
  misc_feature 1..25: note = Description of Artificial Sequence: Syntheticoligonucleotide
  source 1..25: mol_type = other RNA
gtgaagtgatctaaaatttgtaata

SEQ ID NO: 6570 - RNA, 25 nt, synthetic construct
  misc_feature 1..25: note = Description of Artificial Sequence: Syntheticoligonucleotide
  source 1..25: mol_type = other RNA
tgaagtgatctaaaatttgtaatat

SEQ ID NO: 6571 - RNA, 25 nt, synthetic construct
  misc_feature 1..25: note = Description of Artificial Sequence: Syntheticoligonucleotide
  source 1..25: mol_type = other RNA
gaagtgatctaaaatttgtaatatt

SEQ ID NO: 6572 - RNA, 25 nt, synthetic construct
  misc_feature 1..25: note = Description of Artificial Sequence: Syntheticoligonucleotide
  source 1..25: mol_type = other RNA
aagtgatctaaaatttgtaatattt

SEQ ID NO: 6573 - RNA, 25 nt, synthetic construct
  misc_feature 1..25: note = Description of Artificial Sequence: Syntheticoligonucleotide
  source 1..25: mol_type = other RNA
agtgatctaaaatttgtaatatttt

SEQ ID NO: 6574 - RNA, 25 nt, synthetic construct
  misc_feature 1..25: note = Description of Artificial Sequence: Syntheticoligonucleotide
  source 1..25: mol_type = other RNA
atctaaaatttgtaatatttttgtc

SEQ ID NO: 6575 - RNA, 25 nt, synthetic construct
  misc_feature 1..25: note = Description of Artificial Sequence: Syntheticoligonucleotide
  source 1..25: mol_type = other RNA
tctaaaatttgtaatatttttgtca

SEQ ID NO: 6576 - RNA, 25 nt, synthetic construct
  misc_feature 1..25: note = Description of Artificial Sequence: Syntheticoligonucleotide
  source 1..25: mol_type = other RNA
aaatttgtaatatttttgtcatgaa

SEQ ID NO: 6577 - RNA, 25 nt, synthetic construct
  misc_feature 1..25: note = Description of Artificial Sequence: Syntheticoligonucleotide
  source 1..25: mol_type = other RNA
aatttgtaatatttttgtcatgaac

SEQ ID NO: 6578 - RNA, 25 nt, synthetic construct
  misc_feature 1..25: note = Description of Artificial Sequence: Syntheticoligonucleotide
  source 1..25: mol_type = other RNA
atttgtaatatttttgtcatgaact

SEQ ID NO: 6579 - RNA, 25 nt, synthetic construct
  misc_feature 1..25: note = Description of Artificial Sequence: Syntheticoligonucleotide
  source 1..25: mol_type = other RNA
gtaatatttttgtcatgaactgtac

SEQ ID NO: 6580 - RNA, 25 nt, synthetic construct
  misc_feature 1..25: note = Description of Artificial Sequence: Syntheticoligonucleotide
  source 1..25: mol_type = other RNA
taatatttttgtcatgaactgtact

SEQ ID NO: 6581 - RNA, 25 nt, synthetic construct
  misc_feature 1..25: note = Description of Artificial Sequence: Syntheticoligonucleotide
  source 1..25: mol_type = other RNA
aactgtactactcctaattattgta

SEQ ID NO: 6582 - RNA, 25 nt, synthetic construct
  misc_feature 1..25: note = Description of Artificial Sequence: Syntheticoligonucleotide
  source 1..25: mol_type = other RNA
actgtactactcctaattattgtaa

SEQ ID NO: 6583 - RNA, 25 nt, synthetic construct
  misc_feature 1..25: note = Description of Artificial Sequence: Syntheticoligonucleotide
  source 1..25: mol_type = other RNA
tcctaattattgtaatgtaataaaa

SEQ ID NO: 6584 - RNA, 25 nt, synthetic construct
  misc_feature 1..25: note = Description of Artificial Sequence: Syntheticoligonucleotide
  source 1..25: mol_type = other RNA
cctaattattgtaatgtaataaaaa

SEQ ID NO: 6585 - RNA, 25 nt, synthetic construct
  misc_feature 1..25: note = Description of Artificial Sequence: Syntheticoligonucleotide
  source 1..25: mol_type = other RNA
taattattgtaatgtaataaaaata

SEQ ID NO: 6586 - RNA, 25 nt, synthetic construct
  misc_feature 1..25: note = Description of Artificial Sequence: Syntheticoligonucleotide
  source 1..25: mol_type = other RNA
attattgtaatgtaataaaaatagt

SEQ ID NO: 6587 - RNA, 25 nt, synthetic construct
  misc_feature 1..25: note = Description of Artificial Sequence: Syntheticoligonucleotide
  source 1..25: mol_type = other RNA
ttattgtaatgtaataaaaatagtt

SEQ ID NO: 6588 - RNA, 25 nt, synthetic construct
  misc_feature 1..25: note = Description of Artificial Sequence: Syntheticoligonucleotide
  source 1..25: mol_type = other RNA
attgtaatgtaataaaaatagttac

SEQ ID NO: 6589 - RNA, 25 nt, synthetic construct
  misc_feature 1..25: note = Description of Artificial Sequence: Syntheticoligonucleotide
  source 1..25: mol_type = other RNA
ttgtaatgtaataaaaatagttaca

SEQ ID NO: 6590 - RNA, 25 nt, synthetic construct
  misc_feature 1..25: note = Description of Artificial Sequence: Syntheticoligonucleotide
  source 1..25: mol_type = other RNA
aatgtaataaaaatagttacagtga

SEQ ID NO: 6591 - RNA, 25 nt, synthetic construct
  misc_feature 1..25: note = Description of Artificial Sequence: Syntheticoligonucleotide
  source 1..25: mol_type = other RNA
atgtaataaaaatagttacagtgac

SEQ ID NO: 6592 - RNA, 25 nt, synthetic construct
  misc_feature 1..25: note = Description of Artificial Sequence: Syntheticoligonucleotide
  source 1..25: mol_type = other RNA
tgtaataaaaatagttacagtgaca

SEQ ID NO: 6593 - RNA, 25 nt, synthetic construct
  misc_feature 1..25: note = Description of Artificial Sequence: Syntheticoligonucleotide
  source 1..25: mol_type = other RNA
aaatagttacagtgacaaaaaaaaa

SEQ ID NO: 6594 - RNA, 25 nt, synthetic construct
  misc_feature 1..25: note = Description of Artificial Sequence: Syntheticoligonucleotide
  source 1..25: mol_type = other RNA
aatagttacagtgacaaaaaaaaaa

SEQ ID NO: 6595 - RNA, 25 nt, synthetic construct
  misc_feature 1..25: note = Description of Artificial Sequence: Syntheticoligonucleotide
  source 1..25: mol_type = other RNA
tagttacagtgacaaaaaaaaaaaa

SEQ ID NO: 6596 - RNA, 25 nt, synthetic construct
  misc_feature 1..25: note = Description of Artificial Sequence: Syntheticoligonucleotide
  source 1..25: mol_type = other RNA
gaggcctgctgaaaatgactgaata

SEQ ID NO: 6597 - RNA, 25 nt, synthetic construct
  misc_feature 1..25: note = Description of Artificial Sequence: Syntheticoligonucleotide
  source 1..25: mol_type = other RNA
aggcctgctgaaaatgactgaatat

SEQ ID NO: 6598 - RNA, 25 nt, synthetic construct
  misc_feature 1..25: note = Description of Artificial Sequence: Syntheticoligonucleotide
  source 1..25: mol_type = other RNA
ggcctgctgaaaatgactgaatata

SEQ ID NO: 6599 - RNA, 25 nt, synthetic construct
  misc_feature 1..25: note = Description of Artificial Sequence: Syntheticoligonucleotide
  source 1..25: mol_type = other RNA
gcctgctgaaaatgactgaatataa

SEQ ID NO: 6600 - RNA, 25 nt, synthetic construct
  misc_feature 1..25: note = Description of Artificial Sequence: Syntheticoligonucleotide
  source 1..25: mol_type = other RNA
gttggagctggtggcgtaggcaaga

SEQ ID NO: 6601 - RNA, 25 nt, synthetic construct
  misc_feature 1..25: note = Description of Artificial Sequence: Syntheticoligonucleotide
  source 1..25: mol_type = other RNA
ttggagctggtggcgtaggcaagag

SEQ ID NO: 6602 - RNA, 25 nt, synthetic construct
  misc_feature 1..25: note = Description of Artificial Sequence: Syntheticoligonucleotide
  source 1..25: mol_type = other RNA
tggagctggtggcgtaggcaagagt

SEQ ID NO: 6603 - RNA, 25 nt, synthetic construct
  misc_feature 1..25: note = Description of Artificial Sequence: Syntheticoligonucleotide
  source 1..25: mol_type = other RNA
ggagctggtggcgtaggcaagagtg

SEQ ID NO: 6604 - RNA, 25 nt, synthetic construct
  misc_feature 1..25: note = Description of Artificial Sequence: Syntheticoligonucleotide
  source 1..25: mol_type = other RNA
gagctggtggcgtaggcaagagtgc

SEQ ID NO: 6605 - RNA, 25 nt, synthetic construct
  misc_feature 1..25: note = Description of Artificial Sequence: Syntheticoligonucleotide
  source 1..25: mol_type = other RNA
agctggtggcgtaggcaagagtgcc

SEQ ID NO: 6606 - RNA, 25 nt, synthetic construct
  misc_feature 1..25: note = Description of Artificial Sequence: Syntheticoligonucleotide
  source 1..25: mol_type = other RNA
gctggtggcgtaggcaagagtgcct

SEQ ID NO: 6607 - RNA, 25 nt, synthetic construct
  misc_feature 1..25: note = Description of Artificial Sequence: Syntheticoligonucleotide
  source 1..25: mol_type = other RNA
tacagctaattcagaatcattttgt

SEQ ID NO: 6608 - RNA, 25 nt, synthetic construct
  misc_feature 1..25: note = Description of Artificial Sequence: Syntheticoligonucleotide
  source 1..25: mol_type = other RNA
taattgatggagaaacctgtctctt

SEQ ID NO: 6609 - RNA, 25 nt, synthetic construct
  misc_feature 1..25: note = Description of Artificial Sequence: Syntheticoligonucleotide
  source 1..25: mol_type = other RNA
aattgatggagaaacctgtctcttg

SEQ ID NO: 6610 - RNA, 25 nt, synthetic construct
  misc_feature 1..25: note = Description of Artificial Sequence: Syntheticoligonucleotide
  source 1..25: mol_type = other RNA
gatggagaaacctgtctcttggata

SEQ ID NO: 6611 - RNA, 25 nt, synthetic construct
  misc_feature 1..25: note = Description of Artificial Sequence: Syntheticoligonucleotide
  source 1..25: mol_type = other RNA
cctgtctcttggatattctcgacac

SEQ ID NO: 6612 - RNA, 25 nt, synthetic construct
  misc_feature 1..25: note = Description of Artificial Sequence: Syntheticoligonucleotide
  source 1..25: mol_type = other RNA
tgtctcttggatattctcgacacag

SEQ ID NO: 6613 - RNA, 25 nt, synthetic construct
  misc_feature 1..25: note = Description of Artificial Sequence: Syntheticoligonucleotide
  source 1..25: mol_type = other RNA
gtctcttggatattctcgacacagc

SEQ ID NO: 6614 - RNA, 25 nt, synthetic construct
  misc_feature 1..25: note = Description of Artificial Sequence: Syntheticoligonucleotide
  source 1..25: mol_type = other RNA
tctcttggatattctcgacacagca

SEQ ID NO: 6615 - RNA, 25 nt, synthetic construct
  misc_feature 1..25: note = Description of Artificial Sequence: Syntheticoligonucleotide
  source 1..25: mol_type = other RNA
ctcttggatattctcgacacagcag

SEQ ID NO: 6616 - RNA, 25 nt, synthetic construct
  misc_feature 1..25: note = Description of Artificial Sequence: Syntheticoligonucleotide
  source 1..25: mol_type = other RNA
tcttggatattctcgacacagcagg

SEQ ID NO: 6617 - RNA, 25 nt, synthetic construct
  misc_feature 1..25: note = Description of Artificial Sequence: Syntheticoligonucleotide
  source 1..25: mol_type = other RNA
cttggatattctcgacacagcaggt

SEQ ID NO: 6618 - RNA, 25 nt, synthetic construct
  misc_feature 1..25: note = Description of Artificial Sequence: Syntheticoligonucleotide
  source 1..25: mol_type = other RNA
ttggatattctcgacacagcaggtc

SEQ ID NO: 6619 - RNA, 25 nt, synthetic construct
  misc_feature 1..25: note = Description of Artificial Sequence: Syntheticoligonucleotide
  source 1..25: mol_type = other RNA
cagcaggtcaagaggagtacagtgc

SEQ ID NO: 6620 - RNA, 25 nt, synthetic construct
  misc_feature 1..25: note = Description of Artificial Sequence: Syntheticoligonucleotide
  source 1..25: mol_type = other RNA
agcaggtcaagaggagtacagtgca

SEQ ID NO: 6621 - RNA, 25 nt, synthetic construct
  misc_feature 1..25: note = Description of Artificial Sequence: Syntheticoligonucleotide
  source 1..25: mol_type = other RNA
gcaggtcaagaggagtacagtgcaa

SEQ ID NO: 6622 - RNA, 25 nt, synthetic construct
  misc_feature 1..25: note = Description of Artificial Sequence: Syntheticoligonucleotide
  source 1..25: mol_type = other RNA
aggagtacagtgcaatgagggacca

SEQ ID NO: 6623 - RNA, 25 nt, synthetic construct
  misc_feature 1..25: note = Description of Artificial Sequence: Syntheticoligonucleotide
  source 1..25: mol_type = other RNA
ggagtacagtgcaatgagggaccag

SEQ ID NO: 6624 - RNA, 25 nt, synthetic construct
  misc_feature 1..25: note = Description of Artificial Sequence: Syntheticoligonucleotide
  source 1..25: mol_type = other RNA
gagtacagtgcaatgagggaccagt

SEQ ID NO: 6625 - RNA, 25 nt, synthetic construct
  misc_feature 1..25: note = Description of Artificial Sequence: Syntheticoligonucleotide
  source 1..25: mol_type = other RNA
agtacagtgcaatgagggaccagta

SEQ ID NO: 6626 - RNA, 25 nt, synthetic construct
  misc_feature 1..25: note = Description of Artificial Sequence: Syntheticoligonucleotide
  source 1..25: mol_type = other RNA
gtacagtgcaatgagggaccagtac

SEQ ID NO: 6627 - RNA, 25 nt, synthetic construct
  misc_feature 1..25: note = Description of Artificial Sequence: Syntheticoligonucleotide
  source 1..25: mol_type = other RNA
tacagtgcaatgagggaccagtaca

SEQ ID NO: 6628 - RNA, 25 nt, synthetic construct
  misc_feature 1..25: note = Description of Artificial Sequence: Syntheticoligonucleotide
  source 1..25: mol_type = other RNA
acagtgcaatgagggaccagtacat

SEQ ID NO: 6629 - RNA, 25 nt, synthetic construct
  misc_feature 1..25: note = Description of Artificial Sequence: Syntheticoligonucleotide
  source 1..25: mol_type = other RNA
cagtgcaatgagggaccagtacatg

SEQ ID NO: 6630 - RNA, 25 nt, synthetic construct
  misc_feature 1..25: note = Description of Artificial Sequence: Syntheticoligonucleotide
  source 1..25: mol_type = other RNA
agtgcaatgagggaccagtacatga

SEQ ID NO: 6631 - RNA, 25 nt, synthetic construct
  misc_feature 1..25: note = Description of Artificial Sequence: Syntheticoligonucleotide
  source 1..25: mol_type = other RNA
gtatttgccataaataatactaaat

SEQ ID NO: 6632 - RNA, 25 nt, synthetic construct
  misc_feature 1..25: note = Description of Artificial Sequence: Syntheticoligonucleotide
  source 1..25: mol_type = other RNA
tatttgccataaataatactaaatc

SEQ ID NO: 6633 - RNA, 25 nt, synthetic construct
  misc_feature 1..25: note = Description of Artificial Sequence: Syntheticoligonucleotide
  source 1..25: mol_type = other RNA
atttgccataaataatactaaatca

SEQ ID NO: 6634 - RNA, 25 nt, synthetic construct
  misc_feature 1..25: note = Description of Artificial Sequence: Syntheticoligonucleotide
  source 1..25: mol_type = other RNA
tttgccataaataatactaaatcat

SEQ ID NO: 6635 - RNA, 25 nt, synthetic construct
  misc_feature 1..25: note = Description of Artificial Sequence: Syntheticoligonucleotide
  source 1..25: mol_type = other RNA
ttgccataaataatactaaatcatt

SEQ ID NO: 6636 - RNA, 25 nt, synthetic construct
  misc_feature 1..25: note = Description of Artificial Sequence: Syntheticoligonucleotide
  source 1..25: mol_type = other RNA
tgccataaataatactaaatcattt

SEQ ID NO: 6637 - RNA, 25 nt, synthetic construct
  misc_feature 1..25: note = Description of Artificial Sequence: Syntheticoligonucleotide
  source 1..25: mol_type = other RNA
gccataaataatactaaatcatttg

SEQ ID NO: 6638 - RNA, 25 nt, synthetic construct
  misc_feature 1..25: note = Description of Artificial Sequence: Syntheticoligonucleotide
  source 1..25: mol_type = other RNA
atactaaatcatttgaagatattca

SEQ ID NO: 6639 - RNA, 25 nt, synthetic construct
  misc_feature 1..25: note = Description of Artificial Sequence: Syntheticoligonucleotide
  source 1..25: mol_type = other RNA
tactaaatcatttgaagatattcac

SEQ ID NO: 6640 - RNA, 25 nt, synthetic construct
  misc_feature 1..25: note = Description of Artificial Sequence: Syntheticoligonucleotide
  source 1..25: mol_type = other RNA
actaaatcatttgaagatattcacc

SEQ ID NO: 6641 - RNA, 25 nt, synthetic construct
  misc_feature 1..25: note = Description of Artificial Sequence: Syntheticoligonucleotide
  source 1..25: mol_type = other RNA
ctaaatcatttgaagatattcacca

SEQ ID NO: 6642 - RNA, 25 nt, synthetic construct
  misc_feature 1..25: note = Description of Artificial Sequence: Syntheticoligonucleotide
  source 1..25: mol_type = other RNA
taaatcatttgaagatattcaccat

SEQ ID NO: 6643 - RNA, 25 nt, synthetic construct
  misc_feature 1..25: note = Description of Artificial Sequence: Syntheticoligonucleotide
  source 1..25: mol_type = other RNA
aaatcatttgaagatattcaccatt

SEQ ID NO: 6644 - RNA, 25 nt, synthetic construct
  misc_feature 1..25: note = Description of Artificial Sequence: Syntheticoligonucleotide
  source 1..25: mol_type = other RNA
aatcatttgaagatattcaccatta

SEQ ID NO: 6645 - RNA, 25 nt, synthetic construct
  misc_feature 1..25: note = Description of Artificial Sequence: Syntheticoligonucleotide
  source 1..25: mol_type = other RNA
atcatttgaagatattcaccattat

SEQ ID NO: 6646 - RNA, 25 nt, synthetic construct
  misc_feature 1..25: note = Description of Artificial Sequence: Syntheticoligonucleotide
  source 1..25: mol_type = other RNA
tcatttgaagatattcaccattata

SEQ ID NO: 6647 - RNA, 25 nt, synthetic construct
  misc_feature 1..25: note = Description of Artificial Sequence: Syntheticoligonucleotide
  source 1..25: mol_type = other RNA
atattcaccattatagagaacaaat

SEQ ID NO: 6648 - RNA, 25 nt, synthetic construct
  misc_feature 1..25: note = Description of Artificial Sequence: Syntheticoligonucleotide
  source 1..25: mol_type = other RNA
tattcaccattatagagaacaaatt

SEQ ID NO: 6649 - RNA, 25 nt, synthetic construct
  misc_feature 1..25: note = Description of Artificial Sequence: Syntheticoligonucleotide
  source 1..25: mol_type = other RNA
attcaccattatagagaacaaatta

SEQ ID NO: 6650 - RNA, 25 nt, synthetic construct
  misc_feature 1..25: note = Description of Artificial Sequence: Syntheticoligonucleotide
  source 1..25: mol_type = other RNA
ttcaccattatagagaacaaattaa

SEQ ID NO: 6651 - RNA, 25 nt, synthetic construct
  misc_feature 1..25: note = Description of Artificial Sequence: Syntheticoligonucleotide
  source 1..25: mol_type = other RNA
tcaccattatagagaacaaattaaa

SEQ ID NO: 6652 - RNA, 25 nt, synthetic construct
  misc_feature 1..25: note = Description of Artificial Sequence: Syntheticoligonucleotide
  source 1..25: mol_type = other RNA
caccattatagagaacaaattaaaa

SEQ ID NO: 6653 - RNA, 25 nt, synthetic construct
  misc_feature 1..25: note = Description of Artificial Sequence: Syntheticoligonucleotide
  source 1..25: mol_type = other RNA
accattatagagaacaaattaaaag

SEQ ID NO: 6654 - RNA, 25 nt, synthetic construct
  misc_feature 1..25: note = Description of Artificial Sequence: Syntheticoligonucleotide
  source 1..25: mol_type = other RNA
ccattatagagaacaaattaaaaga

SEQ ID NO: 6655 - RNA, 25 nt, synthetic construct
  misc_feature 1..25: note = Description of Artificial Sequence: Syntheticoligonucleotide
  source 1..25: mol_type = other RNA
cattatagagaacaaattaaaagag

SEQ ID NO: 6656 - RNA, 25 nt, synthetic construct
  misc_feature 1..25: note = Description of Artificial Sequence: Syntheticoligonucleotide
  source 1..25: mol_type = other RNA
ctatggtcctagtaggaaataaatg

SEQ ID NO: 6657 - RNA, 25 nt, synthetic construct
  misc_feature 1..25: note = Description of Artificial Sequence: Syntheticoligonucleotide
  source 1..25: mol_type = other RNA
tgtgatttgccttctagaacagtag

SEQ ID NO: 6658 - RNA, 25 nt, synthetic construct
  misc_feature 1..25: note = Description of Artificial Sequence: Syntheticoligonucleotide
  source 1..25: mol_type = other RNA
gtgatttgccttctagaacagtaga

SEQ ID NO: 6659 - RNA, 25 nt, synthetic construct
  misc_feature 1..25: note = Description of Artificial Sequence: Syntheticoligonucleotide
  source 1..25: mol_type = other RNA
gatttgccttctagaacagtagaca

SEQ ID NO: 6660 - RNA, 25 nt, synthetic construct
  misc_feature 1..25: note = Description of Artificial Sequence: Syntheticoligonucleotide
  source 1..25: mol_type = other RNA
gttatggaattccttttattgaaac

SEQ ID NO: 6661 - RNA, 25 nt, synthetic construct
  misc_feature 1..25: note = Description of Artificial Sequence: Syntheticoligonucleotide
  source 1..25: mol_type = other RNA
ttatggaattccttttattgaaaca

SEQ ID NO: 6662 - RNA, 25 nt, synthetic construct
  misc_feature 1..25: note = Description of Artificial Sequence: Syntheticoligonucleotide
  source 1..25: mol_type = other RNA
tatggaattccttttattgaaacat

SEQ ID NO: 6663 - RNA, 25 nt, synthetic construct
  misc_feature 1..25: note = Description of Artificial Sequence: Syntheticoligonucleotide
  source 1..25: mol_type = other RNA
gatgccttctatacattagttcgag

SEQ ID NO: 6664 - RNA, 25 nt, synthetic construct
  misc_feature 1..25: note = Description of Artificial Sequence: Syntheticoligonucleotide
  source 1..25: mol_type = other RNA
atgccttctatacattagttcgaga

SEQ ID NO: 6665 - RNA, 25 nt, synthetic construct
  misc_feature 1..25: note = Description of Artificial Sequence: Syntheticoligonucleotide
  source 1..25: mol_type = other RNA
cgagaaattcgaaaacataaagaaa

SEQ ID NO: 6666 - RNA, 25 nt, synthetic construct
  misc_feature 1..25: note = Description of Artificial Sequence: Syntheticoligonucleotide
  source 1..25: mol_type = other RNA
gaaaacataaagaaaagatgagcaa

SEQ ID NO: 6667 - RNA, 25 nt, synthetic construct
  misc_feature 1..25: note = Description of Artificial Sequence: Syntheticoligonucleotide
  source 1..25: mol_type = other RNA
aaaacataaagaaaagatgagcaaa

SEQ ID NO: 6668 - RNA, 25 nt, synthetic construct
  misc_feature 1..25: note = Description of Artificial Sequence: Syntheticoligonucleotide
  source 1..25: mol_type = other RNA
aaacataaagaaaagatgagcaaag

SEQ ID NO: 6669 - RNA, 25 nt, synthetic construct
  misc_feature 1..25: note = Description of Artificial Sequence: Syntheticoligonucleotide
  source 1..25: mol_type = other RNA
aacataaagaaaagatgagcaaaga

SEQ ID NO: 6670 - RNA, 25 nt, synthetic construct
  misc_feature 1..25: note = Description of Artificial Sequence: Syntheticoligonucleotide
  source 1..25: mol_type = other RNA
acataaagaaaagatgagcaaagat

SEQ ID NO: 6671 - RNA, 25 nt, synthetic construct
  misc_feature 1..25: note = Description of Artificial Sequence: Syntheticoligonucleotide
  source 1..25: mol_type = other RNA
cataaagaaaagatgagcaaagatg

SEQ ID NO: 6672 - RNA, 25 nt, synthetic construct
  misc_feature 1..25: note = Description of Artificial Sequence: Syntheticoligonucleotide
  source 1..25: mol_type = other RNA
ataaagaaaagatgagcaaagatgg

SEQ ID NO: 6673 - RNA, 25 nt, synthetic construct
  misc_feature 1..25: note = Description of Artificial Sequence: Syntheticoligonucleotide
  source 1..25: mol_type = other RNA
taaagaaaagatgagcaaagatggt

SEQ ID NO: 6674 - RNA, 25 nt, synthetic construct
  misc_feature 1..25: note = Description of Artificial Sequence: Syntheticoligonucleotide
  source 1..25: mol_type = other RNA
aaagaaaagatgagcaaagatggta

SEQ ID NO: 6675 - RNA, 25 nt, synthetic construct
  misc_feature 1..25: note = Description of Artificial Sequence: Syntheticoligonucleotide
  source 1..25: mol_type = other RNA
aagtggtaatttttgtacattacac

SEQ ID NO: 6676 - RNA, 25 nt, synthetic construct
  misc_feature 1..25: note = Description of Artificial Sequence: Syntheticoligonucleotide
  source 1..25: mol_type = other RNA
agtggtaatttttgtacattacact

SEQ ID NO: 6677 - RNA, 25 nt, synthetic construct
  misc_feature 1..25: note = Description of Artificial Sequence: Syntheticoligonucleotide
  source 1..25: mol_type = other RNA
ttgtacattacactaaattattagc

SEQ ID NO: 6678 - RNA, 25 nt, synthetic construct
  misc_feature 1..25: note = Description of Artificial Sequence: Syntheticoligonucleotide
  source 1..25: mol_type = other RNA
tgtacattacactaaattattagca

SEQ ID NO: 6679 - RNA, 25 nt, synthetic construct
  misc_feature 1..25: note = Description of Artificial Sequence: Syntheticoligonucleotide
  source 1..25: mol_type = other RNA
gtacattacactaaattattagcat

SEQ ID NO: 6680 - RNA, 25 nt, synthetic construct
  misc_feature 1..25: note = Description of Artificial Sequence: Syntheticoligonucleotide
  source 1..25: mol_type = other RNA
tacattacactaaattattagcatt

SEQ ID NO: 6681 - RNA, 25 nt, synthetic construct
  misc_feature 1..25: note = Description of Artificial Sequence: Syntheticoligonucleotide
  source 1..25: mol_type = other RNA
acattacactaaattattagcattt

SEQ ID NO: 6682 - RNA, 25 nt, synthetic construct
  misc_feature 1..25: note = Description of Artificial Sequence: Syntheticoligonucleotide
  source 1..25: mol_type = other RNA
cattacactaaattattagcatttg

SEQ ID NO: 6683 - RNA, 25 nt, synthetic construct
  misc_feature 1..25: note = Description of Artificial Sequence: Syntheticoligonucleotide
  source 1..25: mol_type = other RNA
attacactaaattattagcatttgt

SEQ ID NO: 6684 - RNA, 25 nt, synthetic construct
  misc_feature 1..25: note = Description of Artificial Sequence: Syntheticoligonucleotide
  source 1..25: mol_type = other RNA
ttacactaaattattagcatttgtt

SEQ ID NO: 6685 - RNA, 25 nt, synthetic construct
  misc_feature 1..25: note = Description of Artificial Sequence: Syntheticoligonucleotide
  source 1..25: mol_type = other RNA
tacactaaattattagcatttgttt

SEQ ID NO: 6686 - RNA, 25 nt, synthetic construct
  misc_feature 1..25: note = Description of Artificial Sequence: Syntheticoligonucleotide
  source 1..25: mol_type = other RNA
tattagcatttgttttagcattacc

SEQ ID NO: 6687 - RNA, 25 nt, synthetic construct
  misc_feature 1..25: note = Description of Artificial Sequence: Syntheticoligonucleotide
  source 1..25: mol_type = other RNA
attagcatttgttttagcattacct

SEQ ID NO: 6688 - RNA, 25 nt, synthetic construct
  misc_feature 1..25: note = Description of Artificial Sequence: Syntheticoligonucleotide
  source 1..25: mol_type = other RNA
ttagcatttgttttagcattaccta

SEQ ID NO: 6689 - RNA, 25 nt, synthetic construct
  misc_feature 1..25: note = Description of Artificial Sequence: Syntheticoligonucleotide
  source 1..25: mol_type = other RNA
tagcatttgttttagcattacctaa

SEQ ID NO: 6690 - RNA, 25 nt, synthetic construct
  misc_feature 1..25: note = Description of Artificial Sequence: Syntheticoligonucleotide
  source 1..25: mol_type = other RNA
agcatttgttttagcattacctaat

SEQ ID NO: 6691 - RNA, 25 nt, synthetic construct
  misc_feature 1..25: note = Description of Artificial Sequence: Syntheticoligonucleotide
  source 1..25: mol_type = other RNA
gcatttgttttagcattacctaatt

SEQ ID NO: 6692 - RNA, 25 nt, synthetic construct
  misc_feature 1..25: note = Description of Artificial Sequence: Syntheticoligonucleotide
  source 1..25: mol_type = other RNA
catttgttttagcattacctaattt

SEQ ID NO: 6693 - RNA, 25 nt, synthetic construct
  misc_feature 1..25: note = Description of Artificial Sequence: Syntheticoligonucleotide
  source 1..25: mol_type = other RNA
atttgttttagcattacctaatttt

SEQ ID NO: 6694 - RNA, 25 nt, synthetic construct
  misc_feature 1..25: note = Description of Artificial Sequence: Syntheticoligonucleotide
  source 1..25: mol_type = other RNA
tttgttttagcattacctaattttt

SEQ ID NO: 6695 - RNA, 25 nt, synthetic construct
  misc_feature 1..25: note = Description of Artificial Sequence: Syntheticoligonucleotide
  source 1..25: mol_type = other RNA
cttattttaaaatgacagtggaagt

SEQ ID NO: 6696 - RNA, 25 nt, synthetic construct
  misc_feature 1..25: note = Description of Artificial Sequence: Syntheticoligonucleotide
  source 1..25: mol_type = other RNA
tattttaaaatgacagtggaagttt

SEQ ID NO: 6697 - RNA, 25 nt, synthetic construct
  misc_feature 1..25: note = Description of Artificial Sequence: Syntheticoligonucleotide
  source 1..25: mol_type = other RNA
tctaagtgccagtattcccagagtt

SEQ ID NO: 6698 - RNA, 25 nt, synthetic construct
  misc_feature 1..25: note = Description of Artificial Sequence: Syntheticoligonucleotide
  source 1..25: mol_type = other RNA
caaattaatgaagcttttgaatcat

SEQ ID NO: 6699 - RNA, 25 nt, synthetic construct
  misc_feature 1..25: note = Description of Artificial Sequence: Syntheticoligonucleotide
  source 1..25: mol_type = other RNA
aaattaatgaagcttttgaatcatc

SEQ ID NO: 6700 - RNA, 25 nt, synthetic construct
  misc_feature 1..25: note = Description of Artificial Sequence: Syntheticoligonucleotide
  source 1..25: mol_type = other RNA
tgtgttttatctagtcacataaatg

SEQ ID NO: 6701 - RNA, 25 nt, synthetic construct
  misc_feature 1..25: note = Description of Artificial Sequence: Syntheticoligonucleotide
  source 1..25: mol_type = other RNA
gtgttttatctagtcacataaatgg

SEQ ID NO: 6702 - RNA, 25 nt, synthetic construct
  misc_feature 1..25: note = Description of Artificial Sequence: Syntheticoligonucleotide
  source 1..25: mol_type = other RNA
ttttatctagtcacataaatggatt

SEQ ID NO: 6703 - RNA, 25 nt, synthetic construct
  misc_feature 1..25: note = Description of Artificial Sequence: Syntheticoligonucleotide
  source 1..25: mol_type = other RNA
taaatggattaattactaatttcag

SEQ ID NO: 6704 - RNA, 25 nt, synthetic construct
  misc_feature 1..25: note = Description of Artificial Sequence: Syntheticoligonucleotide
  source 1..25: mol_type = other RNA
aaatggattaattactaatttcagt

SEQ ID NO: 6705 - RNA, 25 nt, synthetic construct
  misc_feature 1..25: note = Description of Artificial Sequence: Syntheticoligonucleotide
  source 1..25: mol_type = other RNA
attggtttttactgaaacattgagg

SEQ ID NO: 6706 - RNA, 25 nt, synthetic construct
  misc_feature 1..25: note = Description of Artificial Sequence: Syntheticoligonucleotide
  source 1..25: mol_type = other RNA
catttccttttcacattagataaat

SEQ ID NO: 6707 - RNA, 25 nt, synthetic construct
  misc_feature 1..25: note = Description of Artificial Sequence: Syntheticoligonucleotide
  source 1..25: mol_type = other RNA
cttttcacattagataaattactat

SEQ ID NO: 6708 - RNA, 25 nt, synthetic construct
  misc_feature 1..25: note = Description of Artificial Sequence: Syntheticoligonucleotide
  source 1..25: mol_type = other RNA
cattagataaattactataaagact

SEQ ID NO: 6709 - RNA, 25 nt, synthetic construct
  misc_feature 1..25: note = Description of Artificial Sequence: Syntheticoligonucleotide
  source 1..25: mol_type = other RNA
attagataaattactataaagactc

SEQ ID NO: 6710 - RNA, 25 nt, synthetic construct
  misc_feature 1..25: note = Description of Artificial Sequence: Syntheticoligonucleotide
  source 1..25: mol_type = other RNA
ttagataaattactataaagactcc

SEQ ID NO: 6711 - RNA, 25 nt, synthetic construct
  misc_feature 1..25: note = Description of Artificial Sequence: Syntheticoligonucleotide
  source 1..25: mol_type = other RNA
taaggcagacccagtatgaaatggg

SEQ ID NO: 6712 - RNA, 25 nt, synthetic construct
  misc_feature 1..25: note = Description of Artificial Sequence: Syntheticoligonucleotide
  source 1..25: mol_type = other RNA
aaggcagacccagtatgaaatgggg

SEQ ID NO: 6713 - RNA, 25 nt, synthetic construct
  misc_feature 1..25: note = Description of Artificial Sequence: Syntheticoligonucleotide
  source 1..25: mol_type = other RNA
aggcagacccagtatgaaatgggga

SEQ ID NO: 6714 - RNA, 25 nt, synthetic construct
  misc_feature 1..25: note = Description of Artificial Sequence: Syntheticoligonucleotide
  source 1..25: mol_type = other RNA
ggcagacccagtatgaaatggggat

SEQ ID NO: 6715 - RNA, 25 nt, synthetic construct
  misc_feature 1..25: note = Description of Artificial Sequence: Syntheticoligonucleotide
  source 1..25: mol_type = other RNA
tatgaaatggggattattatagcaa

SEQ ID NO: 6716 - RNA, 25 nt, synthetic construct
  misc_feature 1..25: note = Description of Artificial Sequence: Syntheticoligonucleotide
  source 1..25: mol_type = other RNA
gggattattatagcaaccattttgg

SEQ ID NO: 6717 - RNA, 25 nt, synthetic construct
  misc_feature 1..25: note = Description of Artificial Sequence: Syntheticoligonucleotide
  source 1..25: mol_type = other RNA
gggctatatttacatgctactaaat

SEQ ID NO: 6718 - RNA, 25 nt, synthetic construct
  misc_feature 1..25: note = Description of Artificial Sequence: Syntheticoligonucleotide
  source 1..25: mol_type = other RNA
ggctatatttacatgctactaaatt

SEQ ID NO: 6719 - RNA, 25 nt, synthetic construct
  misc_feature 1..25: note = Description of Artificial Sequence: Syntheticoligonucleotide
  source 1..25: mol_type = other RNA
gctatatttacatgctactaaattt

SEQ ID NO: 6720 - RNA, 25 nt, synthetic construct
  misc_feature 1..25: note = Description of Artificial Sequence: Syntheticoligonucleotide
  source 1..25: mol_type = other RNA
ctatatttacatgctactaaatttt

SEQ ID NO: 6721 - RNA, 25 nt, synthetic construct
  misc_feature 1..25: note = Description of Artificial Sequence: Syntheticoligonucleotide
  source 1..25: mol_type = other RNA
tatatttacatgctactaaattttt

SEQ ID NO: 6722 - RNA, 25 nt, synthetic construct
  misc_feature 1..25: note = Description of Artificial Sequence: Syntheticoligonucleotide
  source 1..25: mol_type = other RNA
atatttacatgctactaaattttta

SEQ ID NO: 6723 - RNA, 25 nt, synthetic construct
  misc_feature 1..25: note = Description of Artificial Sequence: Syntheticoligonucleotide
  source 1..25: mol_type = other RNA
tatttacatgctactaaatttttat

SEQ ID NO: 6724 - RNA, 25 nt, synthetic construct
  misc_feature 1..25: note = Description of Artificial Sequence: Syntheticoligonucleotide
  source 1..25: mol_type = other RNA
atttacatgctactaaatttttata

SEQ ID NO: 6725 - RNA, 25 nt, synthetic construct
  misc_feature 1..25: note = Description of Artificial Sequence: Syntheticoligonucleotide
  source 1..25: mol_type = other RNA
tttacatgctactaaatttttataa

SEQ ID NO: 6726 - RNA, 25 nt, synthetic construct
  misc_feature 1..25: note = Description of Artificial Sequence: Syntheticoligonucleotide
  source 1..25: mol_type = other RNA
ttacatgctactaaatttttataat

SEQ ID NO: 6727 - RNA, 25 nt, synthetic construct
  misc_feature 1..25: note = Description of Artificial Sequence: Syntheticoligonucleotide
  source 1..25: mol_type = other RNA
tacatgctactaaatttttataata

SEQ ID NO: 6728 - RNA, 25 nt, synthetic construct
  misc_feature 1..25: note = Description of Artificial Sequence: Syntheticoligonucleotide
  source 1..25: mol_type = other RNA
ctttcatagtataactttaaatctt

SEQ ID NO: 6729 - RNA, 25 nt, synthetic construct
  misc_feature 1..25: note = Description of Artificial Sequence: Syntheticoligonucleotide
  source 1..25: mol_type = other RNA
atagtataactttaaatcttttctt

SEQ ID NO: 6730 - RNA, 25 nt, synthetic construct
  misc_feature 1..25: note = Description of Artificial Sequence: Syntheticoligonucleotide
  source 1..25: mol_type = other RNA
tagtataactttaaatcttttcttc

SEQ ID NO: 6731 - RNA, 25 nt, synthetic construct
  misc_feature 1..25: note = Description of Artificial Sequence: Syntheticoligonucleotide
  source 1..25: mol_type = other RNA
taaatcttttcttcaacttgagtct

SEQ ID NO: 6732 - RNA, 25 nt, synthetic construct
  misc_feature 1..25: note = Description of Artificial Sequence: Syntheticoligonucleotide
  source 1..25: mol_type = other RNA
aaatcttttcttcaacttgagtctt

SEQ ID NO: 6733 - RNA, 25 nt, synthetic construct
  misc_feature 1..25: note = Description of Artificial Sequence: Syntheticoligonucleotide
  source 1..25: mol_type = other RNA
cttgagtctttgaagatagttttaa

SEQ ID NO: 6734 - RNA, 25 nt, synthetic construct
  misc_feature 1..25: note = Description of Artificial Sequence: Syntheticoligonucleotide
  source 1..25: mol_type = other RNA
tgagtctttgaagatagttttaatt

SEQ ID NO: 6735 - RNA, 25 nt, synthetic construct
  misc_feature 1..25: note = Description of Artificial Sequence: Syntheticoligonucleotide
  source 1..25: mol_type = other RNA
gagtctttgaagatagttttaattc

SEQ ID NO: 6736 - RNA, 25 nt, synthetic construct
  misc_feature 1..25: note = Description of Artificial Sequence: Syntheticoligonucleotide
  source 1..25: mol_type = other RNA
gatagttttaattctgcttgtgaca

SEQ ID NO: 6737 - RNA, 25 nt, synthetic construct
  misc_feature 1..25: note = Description of Artificial Sequence: Syntheticoligonucleotide
  source 1..25: mol_type = other RNA
atagttttaattctgcttgtgacat

SEQ ID NO: 6738 - RNA, 25 nt, synthetic construct
  misc_feature 1..25: note = Description of Artificial Sequence: Syntheticoligonucleotide
  source 1..25: mol_type = other RNA
tagttttaattctgcttgtgacatt

SEQ ID NO: 6739 - RNA, 25 nt, synthetic construct
  misc_feature 1..25: note = Description of Artificial Sequence: Syntheticoligonucleotide
  source 1..25: mol_type = other RNA
cttgtgacattaaaagattatttgg

SEQ ID NO: 6740 - RNA, 25 nt, synthetic construct
  misc_feature 1..25: note = Description of Artificial Sequence: Syntheticoligonucleotide
  source 1..25: mol_type = other RNA
tattaactcaaaagttgagattttg

SEQ ID NO: 6741 - RNA, 25 nt, synthetic construct
  misc_feature 1..25: note = Description of Artificial Sequence: Syntheticoligonucleotide
  source 1..25: mol_type = other RNA
tgtgccaagacattaattttttttt

SEQ ID NO: 6742 - RNA, 25 nt, synthetic construct
  misc_feature 1..25: note = Description of Artificial Sequence: Syntheticoligonucleotide
  source 1..25: mol_type = other RNA
tggttaaattaacattgcataaaca

SEQ ID NO: 6743 - RNA, 25 nt, synthetic construct
  misc_feature 1..25: note = Description of Artificial Sequence: Syntheticoligonucleotide
  source 1..25: mol_type = other RNA
ggttaaattaacattgcataaacac

SEQ ID NO: 6744 - RNA, 25 nt, synthetic construct
  misc_feature 1..25: note = Description of Artificial Sequence: Syntheticoligonucleotide
  source 1..25: mol_type = other RNA
gttaaattaacattgcataaacact

SEQ ID NO: 6745 - RNA, 25 nt, synthetic construct
  misc_feature 1..25: note = Description of Artificial Sequence: Syntheticoligonucleotide
  source 1..25: mol_type = other RNA
attgcataaacacttttcaagtctg

SEQ ID NO: 6746 - RNA, 25 nt, synthetic construct
  misc_feature 1..25: note = Description of Artificial Sequence: Syntheticoligonucleotide
  source 1..25: mol_type = other RNA
aagtctgatccatatttaataatgc

SEQ ID NO: 6747 - RNA, 25 nt, synthetic construct
  misc_feature 1..25: note = Description of Artificial Sequence: Syntheticoligonucleotide
  source 1..25: mol_type = other RNA
taaaataaatgaagtgagatggcat

SEQ ID NO: 6748 - RNA, 25 nt, synthetic construct
  misc_feature 1..25: note = Description of Artificial Sequence: Syntheticoligonucleotide
  source 1..25: mol_type = other RNA
aaaataaatgaagtgagatggcatg

SEQ ID NO: 6749 - RNA, 25 nt, synthetic construct
  misc_feature 1..25: note = Description of Artificial Sequence: Syntheticoligonucleotide
  source 1..25: mol_type = other RNA
aagctcagcacaatctgtaaatttt

SEQ ID NO: 6750 - RNA, 25 nt, synthetic construct
  misc_feature 1..25: note = Description of Artificial Sequence: Syntheticoligonucleotide
  source 1..25: mol_type = other RNA
agctcagcacaatctgtaaattttt

SEQ ID NO: 6751 - RNA, 25 nt, synthetic construct
  misc_feature 1..25: note = Description of Artificial Sequence: Syntheticoligonucleotide
  source 1..25: mol_type = other RNA
ataactgtgattcttttaggacaat

SEQ ID NO: 6752 - RNA, 25 nt, synthetic construct
  misc_feature 1..25: note = Description of Artificial Sequence: Syntheticoligonucleotide
  source 1..25: mol_type = other RNA
tgtgattcttttaggacaattactg

SEQ ID NO: 6753 - RNA, 25 nt, synthetic construct
  misc_feature 1..25: note = Description of Artificial Sequence: Syntheticoligonucleotide
  source 1..25: mol_type = other RNA
gtgattcttttaggacaattactgt

SEQ ID NO: 6754 - RNA, 25 nt, synthetic construct
  misc_feature 1..25: note = Description of Artificial Sequence: Syntheticoligonucleotide
  source 1..25: mol_type = other RNA
tgtatgtcagatattcatattgacc

SEQ ID NO: 6755 - RNA, 25 nt, synthetic construct
  misc_feature 1..25: note = Description of Artificial Sequence: Syntheticoligonucleotide
  source 1..25: mol_type = other RNA
gtatgtcagatattcatattgaccc

SEQ ID NO: 6756 - RNA, 25 nt, synthetic construct
  misc_feature 1..25: note = Description of Artificial Sequence: Syntheticoligonucleotide
  source 1..25: mol_type = other RNA
aatgtgtaatattccagttttctct

SEQ ID NO: 6757 - RNA, 25 nt, synthetic construct
  misc_feature 1..25: note = Description of Artificial Sequence: Syntheticoligonucleotide
  source 1..25: mol_type = other RNA
cactgcataggaatttagaacctaa

SEQ ID NO: 6758 - RNA, 25 nt, synthetic construct
  misc_feature 1..25: note = Description of Artificial Sequence: Syntheticoligonucleotide
  source 1..25: mol_type = other RNA
caccattgcacaattttgtcctaat

SEQ ID NO: 6759 - RNA, 25 nt, synthetic construct
  misc_feature 1..25: note = Description of Artificial Sequence: Syntheticoligonucleotide
  source 1..25: mol_type = other RNA
accattgcacaattttgtcctaata

SEQ ID NO: 6760 - RNA, 25 nt, synthetic construct
  misc_feature 1..25: note = Description of Artificial Sequence: Syntheticoligonucleotide
  source 1..25: mol_type = other RNA
ccattgcacaattttgtcctaatat

SEQ ID NO: 6761 - RNA, 25 nt, synthetic construct
  misc_feature 1..25: note = Description of Artificial Sequence: Syntheticoligonucleotide
  source 1..25: mol_type = other RNA
cattgcacaattttgtcctaatata

SEQ ID NO: 6762 - RNA, 25 nt, synthetic construct
  misc_feature 1..25: note = Description of Artificial Sequence: Syntheticoligonucleotide
  source 1..25: mol_type = other RNA
attgcacaattttgtcctaatatat

SEQ ID NO: 6763 - RNA, 25 nt, synthetic construct
  misc_feature 1..25: note = Description of Artificial Sequence: Syntheticoligonucleotide
  source 1..25: mol_type = other RNA
ttgcacaattttgtcctaatatata

SEQ ID NO: 6764 - RNA, 25 nt, synthetic construct
  misc_feature 1..25: note = Description of Artificial Sequence: Syntheticoligonucleotide
  source 1..25: mol_type = other RNA
tagcatgaattctgcattgagaaac

SEQ ID NO: 6765 - RNA, 25 nt, synthetic construct
  misc_feature 1..25: note = Description of Artificial Sequence: Syntheticoligonucleotide
  source 1..25: mol_type = other RNA
agcatgaattctgcattgagaaact

SEQ ID NO: 6766 - RNA, 25 nt, synthetic construct
  misc_feature 1..25: note = Description of Artificial Sequence: Syntheticoligonucleotide
  source 1..25: mol_type = other RNA
tttgaagtgcctgtttgggataatg

SEQ ID NO: 6767 - RNA, 25 nt, synthetic construct
  misc_feature 1..25: note = Description of Artificial Sequence: Syntheticoligonucleotide
  source 1..25: mol_type = other RNA
ttgaagtgcctgtttgggataatga

SEQ ID NO: 6768 - RNA, 25 nt, synthetic construct
  misc_feature 1..25: note = Description of Artificial Sequence: Syntheticoligonucleotide
  source 1..25: mol_type = other RNA
tgaagtgcctgtttgggataatgat

SEQ ID NO: 6769 - RNA, 25 nt, synthetic construct
  misc_feature 1..25: note = Description of Artificial Sequence: Syntheticoligonucleotide
  source 1..25: mol_type = other RNA
tttgagtgccaatttcttactagta

SEQ ID NO: 6770 - RNA, 25 nt, synthetic construct
  misc_feature 1..25: note = Description of Artificial Sequence: Syntheticoligonucleotide
  source 1..25: mol_type = other RNA
ttgagtgccaatttcttactagtac

SEQ ID NO: 6771 - RNA, 25 nt, synthetic construct
  misc_feature 1..25: note = Description of Artificial Sequence: Syntheticoligonucleotide
  source 1..25: mol_type = other RNA
tgagtgccaatttcttactagtact

SEQ ID NO: 6772 - RNA, 25 nt, synthetic construct
  misc_feature 1..25: note = Description of Artificial Sequence: Syntheticoligonucleotide
  source 1..25: mol_type = other RNA
gagtgccaatttcttactagtacta

SEQ ID NO: 6773 - RNA, 25 nt, synthetic construct
  misc_feature 1..25: note = Description of Artificial Sequence: Syntheticoligonucleotide
  source 1..25: mol_type = other RNA
agtgccaatttcttactagtactat

SEQ ID NO: 6774 - RNA, 25 nt, synthetic construct
  misc_feature 1..25: note = Description of Artificial Sequence: Syntheticoligonucleotide
  source 1..25: mol_type = other RNA
gtgccaatttcttactagtactatt

SEQ ID NO: 6775 - RNA, 25 nt, synthetic construct
  misc_feature 1..25: note = Description of Artificial Sequence: Syntheticoligonucleotide
  source 1..25: mol_type = other RNA
atgtattttaactatttttgtatag

SEQ ID NO: 6776 - RNA, 25 nt, synthetic construct
  misc_feature 1..25: note = Description of Artificial Sequence: Syntheticoligonucleotide
  source 1..25: mol_type = other RNA
tgtattttaactatttttgtatagt

SEQ ID NO: 6777 - RNA, 25 nt, synthetic construct
  misc_feature 1..25: note = Description of Artificial Sequence: Syntheticoligonucleotide
  source 1..25: mol_type = other RNA
actatttttgtatagtgtaaactga

SEQ ID NO: 6778 - RNA, 25 nt, synthetic construct
  misc_feature 1..25: note = Description of Artificial Sequence: Syntheticoligonucleotide
  source 1..25: mol_type = other RNA
ctatttttgtatagtgtaaactgaa

SEQ ID NO: 6779 - RNA, 25 nt, synthetic construct
  misc_feature 1..25: note = Description of Artificial Sequence: Syntheticoligonucleotide
  source 1..25: mol_type = other RNA
tatttttgtatagtgtaaactgaaa

SEQ ID NO: 6780 - RNA, 25 nt, synthetic construct
  misc_feature 1..25: note = Description of Artificial Sequence: Syntheticoligonucleotide
  source 1..25: mol_type = other RNA
atttttgtatagtgtaaactgaaac

SEQ ID NO: 6781 - RNA, 25 nt, synthetic construct
  misc_feature 1..25: note = Description of Artificial Sequence: Syntheticoligonucleotide
  source 1..25: mol_type = other RNA
tttttgtatagtgtaaactgaaaca

SEQ ID NO: 6782 - RNA, 25 nt, synthetic construct
  misc_feature 1..25: note = Description of Artificial Sequence: Syntheticoligonucleotide
  source 1..25: mol_type = other RNA
ttttgtatagtgtaaactgaaacat

SEQ ID NO: 6783 - RNA, 25 nt, synthetic construct
  misc_feature 1..25: note = Description of Artificial Sequence: Syntheticoligonucleotide
  source 1..25: mol_type = other RNA
aacatgcacattttgtacattgtgc

SEQ ID NO: 6784 - RNA, 25 nt, synthetic construct
  misc_feature 1..25: note = Description of Artificial Sequence: Syntheticoligonucleotide
  source 1..25: mol_type = other RNA
acatgcacattttgtacattgtgct

SEQ ID NO: 6785 - RNA, 25 nt, synthetic construct
  misc_feature 1..25: note = Description of Artificial Sequence: Syntheticoligonucleotide
  source 1..25: mol_type = other RNA
tgcacattttgtacattgtgctttc

SEQ ID NO: 6786 - RNA, 25 nt, synthetic construct
  misc_feature 1..25: note = Description of Artificial Sequence: Syntheticoligonucleotide
  source 1..25: mol_type = other RNA
gcacattttgtacattgtgctttct

SEQ ID NO: 6787 - RNA, 25 nt, synthetic construct
  misc_feature 1..25: note = Description of Artificial Sequence: Syntheticoligonucleotide
  source 1..25: mol_type = other RNA
cacattttgtacattgtgctttctt

SEQ ID NO: 6788 - RNA, 25 nt, synthetic construct
  misc_feature 1..25: note = Description of Artificial Sequence: Syntheticoligonucleotide
  source 1..25: mol_type = other RNA
acattttgtacattgtgctttcttt

SEQ ID NO: 6789 - RNA, 25 nt, synthetic construct
  misc_feature 1..25: note = Description of Artificial Sequence: Syntheticoligonucleotide
  source 1..25: mol_type = other RNA
cattttgtacattgtgctttctttt

SEQ ID NO: 6790 - RNA, 25 nt, synthetic construct
  misc_feature 1..25: note = Description of Artificial Sequence: Syntheticoligonucleotide
  source 1..25: mol_type = other RNA
attttgtacattgtgctttcttttg

SEQ ID NO: 6791 - RNA, 25 nt, synthetic construct
  misc_feature 1..25: note = Description of Artificial Sequence: Syntheticoligonucleotide
  source 1..25: mol_type = other RNA
ttttgtacattgtgctttcttttgt

SEQ ID NO: 6792 - RNA, 25 nt, synthetic construct
  misc_feature 1..25: note = Description of Artificial Sequence: Syntheticoligonucleotide
  source 1..25: mol_type = other RNA
tgggacatatgcagtgtgatccagt

SEQ ID NO: 6793 - RNA, 25 nt, synthetic construct
  misc_feature 1..25: note = Description of Artificial Sequence: Syntheticoligonucleotide
  source 1..25: mol_type = other RNA
gggacatatgcagtgtgatccagtt

SEQ ID NO: 6794 - RNA, 25 nt, synthetic construct
  misc_feature 1..25: note = Description of Artificial Sequence: Syntheticoligonucleotide
  source 1..25: mol_type = other RNA
ggacatatgcagtgtgatccagttg

SEQ ID NO: 6795 - RNA, 25 nt, synthetic construct
  misc_feature 1..25: note = Description of Artificial Sequence: Syntheticoligonucleotide
  source 1..25: mol_type = other RNA
gacatatgcagtgtgatccagttgt

SEQ ID NO: 6796 - RNA, 25 nt, synthetic construct
  misc_feature 1..25: note = Description of Artificial Sequence: Syntheticoligonucleotide
  source 1..25: mol_type = other RNA
acatatgcagtgtgatccagttgtt

SEQ ID NO: 6797 - RNA, 25 nt, synthetic construct
  misc_feature 1..25: note = Description of Artificial Sequence: Syntheticoligonucleotide
  source 1..25: mol_type = other RNA
catatgcagtgtgatccagttgttt

SEQ ID NO: 6798 - RNA, 25 nt, synthetic construct
  misc_feature 1..25: note = Description of Artificial Sequence: Syntheticoligonucleotide
  source 1..25: mol_type = other RNA
atatgcagtgtgatccagttgtttt

SEQ ID NO: 6799 - RNA, 25 nt, synthetic construct
  misc_feature 1..25: note = Description of Artificial Sequence: Syntheticoligonucleotide
  source 1..25: mol_type = other RNA
tatgcagtgtgatccagttgttttc

SEQ ID NO: 6800 - RNA, 25 nt, synthetic construct
  misc_feature 1..25: note = Description of Artificial Sequence: Syntheticoligonucleotide
  source 1..25: mol_type = other RNA
atgcagtgtgatccagttgttttcc

SEQ ID NO: 6801 - RNA, 25 nt, synthetic construct
  misc_feature 1..25: note = Description of Artificial Sequence: Syntheticoligonucleotide
  source 1..25: mol_type = other RNA
agtgtgatccagttgttttccatca

SEQ ID NO: 6802 - RNA, 25 nt, synthetic construct
  misc_feature 1..25: note = Description of Artificial Sequence: Syntheticoligonucleotide
  source 1..25: mol_type = other RNA
gtgtgatccagttgttttccatcat

SEQ ID NO: 6803 - RNA, 25 nt, synthetic construct
  misc_feature 1..25: note = Description of Artificial Sequence: Syntheticoligonucleotide
  source 1..25: mol_type = other RNA
tgtgatccagttgttttccatcatt

SEQ ID NO: 6804 - RNA, 25 nt, synthetic construct
  misc_feature 1..25: note = Description of Artificial Sequence: Syntheticoligonucleotide
  source 1..25: mol_type = other RNA
gtgatccagttgttttccatcattt

SEQ ID NO: 6805 - RNA, 25 nt, synthetic construct
  misc_feature 1..25: note = Description of Artificial Sequence: Syntheticoligonucleotide
  source 1..25: mol_type = other RNA
tgatccagttgttttccatcatttg

SEQ ID NO: 6806 - RNA, 25 nt, synthetic construct
  misc_feature 1..25: note = Description of Artificial Sequence: Syntheticoligonucleotide
  source 1..25: mol_type = other RNA
gatccagttgttttccatcatttgg

SEQ ID NO: 6807 - RNA, 25 nt, synthetic construct
  misc_feature 1..25: note = Description of Artificial Sequence: Syntheticoligonucleotide
  source 1..25: mol_type = other RNA
tttggttgcgctgacctaggaatgt

SEQ ID NO: 6808 - RNA, 25 nt, synthetic construct
  misc_feature 1..25: note = Description of Artificial Sequence: Syntheticoligonucleotide
  source 1..25: mol_type = other RNA
ttggttgcgctgacctaggaatgtt

SEQ ID NO: 6809 - RNA, 25 nt, synthetic construct
  misc_feature 1..25: note = Description of Artificial Sequence: Syntheticoligonucleotide
  source 1..25: mol_type = other RNA
ggaatgttggtcatatcaaacatta

SEQ ID NO: 6810 - RNA, 25 nt, synthetic construct
  misc_feature 1..25: note = Description of Artificial Sequence: Syntheticoligonucleotide
  source 1..25: mol_type = other RNA
gaatgttggtcatatcaaacattaa

SEQ ID NO: 6811 - RNA, 25 nt, synthetic construct
  misc_feature 1..25: note = Description of Artificial Sequence: Syntheticoligonucleotide
  source 1..25: mol_type = other RNA
aatgttggtcatatcaaacattaaa

SEQ ID NO: 6812 - RNA, 25 nt, synthetic construct
  misc_feature 1..25: note = Description of Artificial Sequence: Syntheticoligonucleotide
  source 1..25: mol_type = other RNA
atgttggtcatatcaaacattaaaa

SEQ ID NO: 6813 - RNA, 25 nt, synthetic construct
  misc_feature 1..25: note = Description of Artificial Sequence: Syntheticoligonucleotide
  source 1..25: mol_type = other RNA
tgttggtcatatcaaacattaaaaa

SEQ ID NO: 6814 - RNA, 25 nt, synthetic construct
  misc_feature 1..25: note = Description of Artificial Sequence: Syntheticoligonucleotide
  source 1..25: mol_type = other RNA
gttggtcatatcaaacattaaaaat

SEQ ID NO: 6815 - RNA, 25 nt, synthetic construct
  misc_feature 1..25: note = Description of Artificial Sequence: Syntheticoligonucleotide
  source 1..25: mol_type = other RNA
ttggtcatatcaaacattaaaaatg

SEQ ID NO: 6816 - RNA, 25 nt, synthetic construct
  misc_feature 1..25: note = Description of Artificial Sequence: Syntheticoligonucleotide
  source 1..25: mol_type = other RNA
tggtcatatcaaacattaaaaatga

SEQ ID NO: 6817 - RNA, 25 nt, synthetic construct
  misc_feature 1..25: note = Description of Artificial Sequence: Syntheticoligonucleotide
  source 1..25: mol_type = other RNA
ggtcatatcaaacattaaaaatgac

SEQ ID NO: 6818 - RNA, 25 nt, synthetic construct
  misc_feature 1..25: note = Description of Artificial Sequence: Syntheticoligonucleotide
  source 1..25: mol_type = other RNA
aaattaacttttaaatgtttatagg

SEQ ID NO: 6819 - RNA, 25 nt, synthetic construct
  misc_feature 1..25: note = Description of Artificial Sequence: Syntheticoligonucleotide
  source 1..25: mol_type = other RNA
aattaacttttaaatgtttatagga

SEQ ID NO: 6820 - RNA, 25 nt, synthetic construct
  misc_feature 1..25: note = Description of Artificial Sequence: Syntheticoligonucleotide
  source 1..25: mol_type = other RNA
aacttttaaatgtttataggagtat

SEQ ID NO: 6821 - RNA, 25 nt, synthetic construct
  misc_feature 1..25: note = Description of Artificial Sequence: Syntheticoligonucleotide
  source 1..25: mol_type = other RNA
acttttaaatgtttataggagtatg

SEQ ID NO: 6822 - RNA, 25 nt, synthetic construct
  misc_feature 1..25: note = Description of Artificial Sequence: Syntheticoligonucleotide
  source 1..25: mol_type = other RNA
cttttaaatgtttataggagtatgt

SEQ ID NO: 6823 - RNA, 25 nt, synthetic construct
  misc_feature 1..25: note = Description of Artificial Sequence: Syntheticoligonucleotide
  source 1..25: mol_type = other RNA
ttttaaatgtttataggagtatgtg

SEQ ID NO: 6824 - RNA, 25 nt, synthetic construct
  misc_feature 1..25: note = Description of Artificial Sequence: Syntheticoligonucleotide
  source 1..25: mol_type = other RNA
tttaaatgtttataggagtatgtgc

SEQ ID NO: 6825 - RNA, 25 nt, synthetic construct
  misc_feature 1..25: note = Description of Artificial Sequence: Syntheticoligonucleotide
  source 1..25: mol_type = other RNA
ttaaatgtttataggagtatgtgct

SEQ ID NO: 6826 - RNA, 25 nt, synthetic construct
  misc_feature 1..25: note = Description of Artificial Sequence: Syntheticoligonucleotide
  source 1..25: mol_type = other RNA
aaatttgtaatatttttgtcatgaa

SEQ ID NO: 6827 - RNA, 25 nt, synthetic construct
  misc_feature 1..25: note = Description of Artificial Sequence: Syntheticoligonucleotide
  source 1..25: mol_type = other RNA
aatttgtaatatttttgtcatgaac

SEQ ID NO: 6828 - RNA, 25 nt, synthetic construct
  misc_feature 1..25: note = Description of Artificial Sequence: Syntheticoligonucleotide
  source 1..25: mol_type = other RNA
atttgtaatatttttgtcatgaact

SEQ ID NO: 6829 - RNA, 25 nt, synthetic construct
  misc_feature 1..25: note = Description of Artificial Sequence: Syntheticoligonucleotide
  source 1..25: mol_type = other RNA
tttgtaatatttttgtcatgaactg

SEQ ID NO: 6830 - RNA, 25 nt, synthetic construct
  misc_feature 1..25: note = Description of Artificial Sequence: Syntheticoligonucleotide
  source 1..25: mol_type = other RNA
ttgtaatatttttgtcatgaactgt

SEQ ID NO: 6831 - RNA, 25 nt, synthetic construct
  misc_feature 1..25: note = Description of Artificial Sequence: Syntheticoligonucleotide
  source 1..25: mol_type = other RNA
tgtaatatttttgtcatgaactgta

SEQ ID NO: 6832 - RNA, 25 nt, synthetic construct
  misc_feature 1..25: note = Description of Artificial Sequence: Syntheticoligonucleotide
  source 1..25: mol_type = other RNA
gtaatatttttgtcatgaactgtac

SEQ ID NO: 6833 - RNA, 25 nt, synthetic construct
  misc_feature 1..25: note = Description of Artificial Sequence: Syntheticoligonucleotide
  source 1..25: mol_type = other RNA
taatatttttgtcatgaactgtact

SEQ ID NO: 6834 - RNA, 25 nt, synthetic construct
  misc_feature 1..25: note = Description of Artificial Sequence: Syntheticoligonucleotide
  source 1..25: mol_type = other RNA
attgtaatgtaataaaaatagttac

SEQ ID NO: 6835 - RNA, 25 nt, synthetic construct
  misc_feature 1..25: note = Description of Artificial Sequence: Syntheticoligonucleotide
  source 1..25: mol_type = other RNA
ttgtaatgtaataaaaatagttaca

SEQ ID NO: 6836 - RNA, 25 nt, synthetic construct
  misc_feature 1..25: note = Description of Artificial Sequence: Syntheticoligonucleotide
  source 1..25: mol_type = other RNA
tgtaatgtaataaaaatagttacag

SEQ ID NO: 6837 - RNA, 25 nt, synthetic construct
  misc_feature 1..25: note = Description of Artificial Sequence: Syntheticoligonucleotide
  source 1..25: mol_type = other RNA
gtaatgtaataaaaatagttacagt

SEQ ID NO: 6838 - RNA, 25 nt, synthetic construct
  misc_feature 1..25: note = Description of Artificial Sequence: Syntheticoligonucleotide
  source 1..25: mol_type = other RNA
taatgtaataaaaatagttacagtg

SEQ ID NO: 6839 - RNA, 104 nt, synthetic construct
  misc_feature 1..104: note = Description of Artificial Sequence: Syntheticoligonucleotide
  misc_feature 22..104: note = n is a, c, g, or u
  misc_feature 1..104: note = See specification as filed for detailed description ofsubstitutions and preferred embodiments
  source 1..104: mol_type = other RNA
gtatttgccataaataatactnnnnnnnnnnnnnnnnnnnnnnnnnnnnnnnnnnnnnnnnnnnnnnnnnnnnnnnnnnnnnnnnnnnnnnnnnnnnnnnnnnn

SEQ ID NO: 6840 - RNA, 106 nt, synthetic construct
  misc_feature 1..106: note = Description of Artificial Sequence: Syntheticoligonucleotide
  misc_feature 1..85: note = n is a, c, g, or u
  misc_feature 1..106: note = See specification as filed for detailed description ofsubstitutions and preferred embodiments
  source 1..106: mol_type = other RNA
nnnnnnnnnnnnnnnnnnnnnnnnnnnnnnnnnnnnnnnnnnnnnnnnnnnnnnnnnnnnnnnnnnnnnnnnnnnnnnnnnnnnntattatttatggcaaatacac

SEQ ID NO: 6841 - DNA, 27 bp, synthetic construct
  misc_feature 1..27: note = Description of Artificial Sequence: Syntheticoligonucleotide
  misc_feature 22..27: note = n is a, c, g, or t
  source 1..27: mol_type = other DNA
gtgtatttgccataaataatannnnnn

SEQ ID NO: 6842 - DNA, 34 bp, synthetic construct
  misc_feature 1..34: note = Description of Artificial Sequence: Syntheticoligonucleotide
  source 1..34: mol_type = other DNA
tctttgtgtatttgccataaataatactaaatca

SEQ ID NO: 6843 - DNA, 21 bp, Homo sapiens
  source 1..21: mol_type = other DNA
tagttggagctggtggcgtag

SEQ ID NO: 6844 - DNA, 21 bp, Homo sapiens
  source 1..21: mol_type = other DNA
tagttggagctgttggcgtag

SEQ ID NO: 6845 - DNA, 21 bp, Homo sapiens
  source 1..21: mol_type = other DNA
gatattctcgacacagcaggt

SEQ ID NO: 6846 - DNA, 21 bp, Homo sapiens
  source 1..21: mol_type = other DNA
gatattctcgacacagcaggt

SEQ ID NO: 6847 - DNA, 21 bp, Homo sapiens
  source 1..21: mol_type = other DNA
tattctcgacacagcaggtca

SEQ ID NO: 6848 - DNA, 21 bp, Homo sapiens
  source 1..21: mol_type = other DNA
tattctcgacacagcaggtca

SEQ ID NO: 6849 - DNA, 21 bp, Homo sapiens
  source 1..21: mol_type = other DNA
agcaggtcaagaggagtacag

SEQ ID NO: 6850 - DNA, 21 bp, Homo sapiens
  source 1..21: mol_type = other DNA
agcaggtcatgaggagtacag

SEQ ID NO: 6851 - DNA, 21 bp, Homo sapiens
  source 1..21: mol_type = other DNA
tcaagaggagtacagtgcaat

SEQ ID NO: 6852 - DNA, 21 bp, Homo sapiens
  source 1..21: mol_type = other DNA
tcatgaggagtacagtgcaat

SEQ ID NO: 6853 - DNA, 21 bp, Homo sapiens
  source 1..21: mol_type = other DNA
tacagtgcaatgagggaccag

SEQ ID NO: 6854 - DNA, 21 bp, Homo sapiens
  source 1..21: mol_type = other DNA
actggggagggctttctttgt

SEQ ID NO: 6855 - DNA, 21 bp, Homo sapiens
  source 1..21: mol_type = other DNA
ggggagggctttctttgtgta

SEQ ID NO: 6856 - DNA, 21 bp, Homo sapiens
  source 1..21: mol_type = other DNA
ggagggctttctttgtgtatt

SEQ ID NO: 6857 - DNA, 21 bp, Homo sapiens
  source 1..21: mol_type = other DNA
ggctttctttgtgtatttgcc

SEQ ID NO: 6858 - DNA, 21 bp, Homo sapiens
  source 1..21: mol_type = other DNA
tctttgtgtatttgccataaa

SEQ ID NO: 6859 - DNA, 21 bp, Homo sapiens
  source 1..21: mol_type = other DNA
ctttgtgtatttgccataaat

SEQ ID NO: 6860 - DNA, 21 bp, Homo sapiens
  source 1..21: mol_type = other DNA
tttgtgtatttgccataaata

SEQ ID NO: 6861 - DNA, 21 bp, Homo sapiens
  source 1..21: mol_type = other DNA
ttgtgtatttgccataaataa

SEQ ID NO: 6862 - DNA, 21 bp, Homo sapiens
  source 1..21: mol_type = other DNA
tgtgtatttgccataaataat

SEQ ID NO: 6863 - DNA, 21 bp, Homo sapiens
  source 1..21: mol_type = other DNA
gtgtatttgccataaataata

SEQ ID NO: 6864 - DNA, 21 bp, Homo sapiens
  source 1..21: mol_type = other DNA
ccataaataatactaaatcat

SEQ ID NO: 6865 - DNA, 21 bp, Homo sapiens
  source 1..21: mol_type = other DNA
aataatactaaatcatttgaa

SEQ ID NO: 6866 - DNA, 21 bp, Homo sapiens
  source 1..21: mol_type = other DNA
atactaaatcatttgaagata

SEQ ID NO: 6867 - DNA, 21 bp, Homo sapiens
  source 1..21: mol_type = other DNA
actaaatcatttgaagatatt

SEQ ID NO: 6868 - DNA, 21 bp, Homo sapiens
  source 1..21: mol_type = other DNA
atcatttgaagatattcacca

SEQ ID NO: 6869 - DNA, 21 bp, Homo sapiens
  source 1..21: mol_type = other DNA
ttgaagatattcaccattata

SEQ ID NO: 6870 - DNA, 21 bp, Homo sapiens
  source 1..21: mol_type = other DNA
gaagatattcaccattataga

SEQ ID NO: 6871 - DNA, 21 bp, Homo sapiens
  source 1..21: mol_type = other DNA
acctatggtcctagtaggaaa

SEQ ID NO: 6872 - DNA, 21 bp, Homo sapiens
  source 1..21: mol_type = other DNA
gtgatttgccttctagaacag

SEQ ID NO: 6873 - DNA, 21 bp, Homo sapiens
  source 1..21: mol_type = other DNA
ttgatgatgccttctatacat

SEQ ID NO: 6874 - DNA, 21 bp, Homo sapiens
  source 1..21: mol_type = other DNA
tacattagttcgagaaattcg

SEQ ID NO: 6875 - DNA, 21 bp, Homo sapiens
  source 1..21: mol_type = other DNA
cgagaaattcgaaaacataaa

SEQ ID NO: 6876 - DNA, 21 bp, Homo sapiens
  source 1..21: mol_type = other DNA
cgaaaacataaagaaaagatg

SEQ ID NO: 6877 - DNA, 21 bp, Homo sapiens
  source 1..21: mol_type = other DNA
acataaagaaaagatgagcaa

SEQ ID NO: 6878 - DNA, 21 bp, Homo sapiens
  source 1..21: mol_type = other DNA
acataaagaaaagatgagcaa

SEQ ID NO: 6879 - DNA, 21 bp, Homo sapiens
  source 1..21: mol_type = other DNA
ttttgtacattacactaaatt

SEQ ID NO: 6880 - DNA, 21 bp, Homo sapiens
  source 1..21: mol_type = other DNA
taaattattagcatttgtttt

SEQ ID NO: 6881 - DNA, 21 bp, Homo sapiens
  source 1..21: mol_type = other DNA
tattagcatttgttttagcat

SEQ ID NO: 6882 - DNA, 21 bp, Homo sapiens
  source 1..21: mol_type = other DNA
gaagtttttttttcctctaag

SEQ ID NO: 6883 - DNA, 21 bp, Homo sapiens
  source 1..21: mol_type = other DNA
ctaagtgccagtattcccaga

SEQ ID NO: 6884 - DNA, 21 bp, Homo sapiens
  source 1..21: mol_type = other DNA
ttggtgtgaaacaaattaatg

SEQ ID NO: 6885 - DNA, 21 bp, Homo sapiens
  source 1..21: mol_type = other DNA
ggattaattactaatttcagt

SEQ ID NO: 6886 - DNA, 21 bp, Homo sapiens
  source 1..21: mol_type = other DNA
gctatatttacatgctactaa

SEQ ID NO: 6887 - DNA, 21 bp, Homo sapiens
  source 1..21: mol_type = other DNA
attttaactatttttgtatag

SEQ ID NO: 6888 - DNA, 21 bp, Homo sapiens
  source 1..21: mol_type = other DNA
tgcagtgtgatccagttgttt

SEQ ID NO: 6889 - DNA, 21 bp, Homo sapiens
  source 1..21: mol_type = other DNA
tgctgaaaatgactgaatata

SEQ ID NO: 6890 - DNA, 21 bp, Homo sapiens
  source 1..21: mol_type = other DNA
aaatgactgaatataaacttg

SEQ ID NO: 6891 - DNA, 21 bp, Homo sapiens
  source 1..21: mol_type = other DNA
gactgaatataaacttgtggt

SEQ ID NO: 6892 - DNA, 21 bp, Homo sapiens
  source 1..21: mol_type = other DNA
agctaattcagaatcattttg

SEQ ID NO: 6893 - DNA, 21 bp, Homo sapiens
  source 1..21: mol_type = other DNA
acgaatatgatccaacaatag

SEQ ID NO: 6894 - DNA, 21 bp, Homo sapiens
  source 1..21: mol_type = other DNA
agcaagtagtaattgatggag

SEQ ID NO: 6895 - DNA, 21 bp, Homo sapiens
  source 1..21: mol_type = other DNA
ggagggctttctttgtgtatt

SEQ ID NO: 6896 - DNA, 21 bp, Homo sapiens
  source 1..21: mol_type = other DNA
tctttgtgtatttgccataaa

SEQ ID NO: 6897 - DNA, 21 bp, Homo sapiens
  source 1..21: mol_type = other DNA
ctttgtgtatttgccataaat

SEQ ID NO: 6898 - DNA, 21 bp, Homo sapiens
  source 1..21: mol_type = other DNA
tttgtgtatttgccataaata

SEQ ID NO: 6899 - DNA, 21 bp, Homo sapiens
  source 1..21: mol_type = other DNA
ttgtgtatttgccataaataa

SEQ ID NO: 6900 - DNA, 21 bp, Homo sapiens
  source 1..21: mol_type = other DNA
gtatttgccataaataatact

SEQ ID NO: 6901 - DNA, 21 bp, Homo sapiens
  source 1..21: mol_type = other DNA
tatttgccataaataatacta

SEQ ID NO: 6902 - DNA, 21 bp, Homo sapiens
  source 1..21: mol_type = other DNA
ccataaataatactaaatcat

SEQ ID NO: 6903 - DNA, 21 bp, Homo sapiens
  source 1..21: mol_type = other DNA
cataaataatactaaatcatt

SEQ ID NO: 6904 - DNA, 21 bp, Homo sapiens
  source 1..21: mol_type = other DNA
taaataatactaaatcatttg

SEQ ID NO: 6905 - DNA, 21 bp, Homo sapiens
  source 1..21: mol_type = other DNA
aaataatactaaatcatttga

SEQ ID NO: 6906 - DNA, 21 bp, Homo sapiens
  source 1..21: mol_type = other DNA
aataatactaaatcatttgaa

SEQ ID NO: 6907 - DNA, 21 bp, Homo sapiens
  source 1..21: mol_type = other DNA
ataatactaaatcatttgaag

SEQ ID NO: 6908 - DNA, 21 bp, Homo sapiens
  source 1..21: mol_type = other DNA
atttgaagatattcaccatta

SEQ ID NO: 6909 - DNA, 21 bp, Homo sapiens
  source 1..21: mol_type = other DNA
ttgaagatattcaccattata

SEQ ID NO: 6910 - DNA, 21 bp, Homo sapiens
  source 1..21: mol_type = other DNA
tgaagatattcaccattatag

SEQ ID NO: 6911 - DNA, 21 bp, Homo sapiens
  source 1..21: mol_type = other DNA
gaagatattcaccattataga

SEQ ID NO: 6912 - DNA, 21 bp, Homo sapiens
  source 1..21: mol_type = other DNA
aagatattcaccattatagag

SEQ ID NO: 6913 - DNA, 21 bp, Homo sapiens
  source 1..21: mol_type = other DNA
ccattatagagaacaaattaa

SEQ ID NO: 6914 - DNA, 21 bp, Homo sapiens
  source 1..21: mol_type = other DNA
attatagagaacaaattaaaa

SEQ ID NO: 6915 - DNA, 21 bp, Homo sapiens
  source 1..21: mol_type = other DNA
ttatagagaacaaattaaaag

SEQ ID NO: 6916 - DNA, 21 bp, Homo sapiens
  source 1..21: mol_type = other DNA
tatagagaacaaattaaaaga

SEQ ID NO: 6917 - DNA, 21 bp, Homo sapiens
  source 1..21: mol_type = other DNA
atagagaacaaattaaaagag

SEQ ID NO: 6918 - DNA, 21 bp, Homo sapiens
  source 1..21: mol_type = other DNA
ctagtaggaaataaatgtgat

SEQ ID NO: 6919 - DNA, 21 bp, Homo sapiens
  source 1..21: mol_type = other DNA
tagtaggaaataaatgtgatt

SEQ ID NO: 6920 - DNA, 21 bp, Homo sapiens
  source 1..21: mol_type = other DNA
aagaagttatggaattccttt

SEQ ID NO: 6921 - DNA, 21 bp, Homo sapiens
  source 1..21: mol_type = other DNA
aagttatggaattccttttat

SEQ ID NO: 6922 - DNA, 21 bp, Homo sapiens
  source 1..21: mol_type = other DNA
agttatggaattccttttatt

SEQ ID NO: 6923 - DNA, 21 bp, Homo sapiens
  source 1..21: mol_type = other DNA
gttatggaattccttttattg

SEQ ID NO: 6924 - DNA, 21 bp, Homo sapiens
  source 1..21: mol_type = other DNA
ttatggaattccttttattga

SEQ ID NO: 6925 - DNA, 21 bp, Homo sapiens
  source 1..21: mol_type = other DNA
tggaggatgctttttatacat

SEQ ID NO: 6926 - DNA, 21 bp, Homo sapiens
  source 1..21: mol_type = other DNA
gaggatgctttttatacattg

SEQ ID NO: 6927 - DNA, 21 bp, Homo sapiens
  source 1..21: mol_type = other DNA
acagattgaaaaaaatcagca

SEQ ID NO: 6928 - DNA, 21 bp, Homo sapiens
  source 1..21: mol_type = other DNA
cagattgaaaaaaatcagcaa

SEQ ID NO: 6929 - DNA, 21 bp, Homo sapiens
  source 1..21: mol_type = other DNA
gattgaaaaaaatcagcaaag

SEQ ID NO: 6930 - DNA, 21 bp, Homo sapiens
  source 1..21: mol_type = other DNA
attgaaaaaaatcagcaaaga

SEQ ID NO: 6931 - DNA, 21 bp, Homo sapiens
  source 1..21: mol_type = other DNA
ttgaaaaaaatcagcaaagaa

SEQ ID NO: 6932 - DNA, 21 bp, Homo sapiens
  source 1..21: mol_type = other DNA
tgaaaaaaatcagcaaagaag

SEQ ID NO: 6933 - DNA, 21 bp, Homo sapiens
  source 1..21: mol_type = other DNA
tcctggctgtgtgaaaattaa

SEQ ID NO: 6934 - DNA, 21 bp, Homo sapiens
  source 1..21: mol_type = other DNA
ggctgtgtgaaaattaaaaaa

SEQ ID NO: 6935 - DNA, 21 bp, Homo sapiens
  source 1..21: mol_type = other DNA
gtgtgaaaattaaaaaatgca

SEQ ID NO: 6936 - DNA, 21 bp, Homo sapiens
  source 1..21: mol_type = other DNA
tgtgaaaattaaaaaatgcat

SEQ ID NO: 6937 - DNA, 21 bp, Homo sapiens
  source 1..21: mol_type = other DNA
gtgaaaattaaaaaatgcatt

SEQ ID NO: 6938 - DNA, 21 bp, Homo sapiens
  source 1..21: mol_type = other DNA
tgaaaattaaaaaatgcatta

SEQ ID NO: 6939 - DNA, 21 bp, Homo sapiens
  source 1..21: mol_type = other DNA
aaaattaaaaaatgcattata

SEQ ID NO: 6940 - DNA, 21 bp, Homo sapiens
  source 1..21: mol_type = other DNA
aaattaaaaaatgcattataa

SEQ ID NO: 6941 - DNA, 21 bp, Homo sapiens
  source 1..21: mol_type = other DNA
aattaaaaaatgcattataat

SEQ ID NO: 6942 - DNA, 21 bp, Homo sapiens
  source 1..21: mol_type = other DNA
attaaaaaatgcattataatg

SEQ ID NO: 6943 - DNA, 21 bp, Homo sapiens
  source 1..21: mol_type = other DNA
taaaaaatgcattataatgta

SEQ ID NO: 6944 - DNA, 21 bp, Homo sapiens
  source 1..21: mol_type = other DNA
tgcattataatgtaatctggg

SEQ ID NO: 6945 - DNA, 21 bp, Homo sapiens
  source 1..21: mol_type = other DNA
ttcgagaaattcgaaaacata

SEQ ID NO: 6946 - DNA, 21 bp, Homo sapiens
  source 1..21: mol_type = other DNA
tcgagaaattcgaaaacataa

SEQ ID NO: 6947 - DNA, 21 bp, Homo sapiens
  source 1..21: mol_type = other DNA
cgagaaattcgaaaacataaa

SEQ ID NO: 6948 - DNA, 21 bp, Homo sapiens
  source 1..21: mol_type = other DNA
gaaattcgaaaacataaagaa

SEQ ID NO: 6949 - DNA, 21 bp, Homo sapiens
  source 1..21: mol_type = other DNA
tcgaaaacataaagaaaagat

SEQ ID NO: 6950 - DNA, 21 bp, Homo sapiens
  source 1..21: mol_type = other DNA
cgaaaacataaagaaaagatg

SEQ ID NO: 6951 - DNA, 21 bp, Homo sapiens
  source 1..21: mol_type = other DNA
aaagatggtaaaaagaagaaa

SEQ ID NO: 6952 - DNA, 21 bp, Homo sapiens
  source 1..21: mol_type = other DNA
aagatggtaaaaagaagaaaa

SEQ ID NO: 6953 - DNA, 21 bp, Homo sapiens
  source 1..21: mol_type = other DNA
gatggtaaaaagaagaaaaag

SEQ ID NO: 6954 - DNA, 21 bp, Homo sapiens
  source 1..21: mol_type = other DNA
atggtaaaaagaagaaaaaga

SEQ ID NO: 6955 - DNA, 21 bp, Homo sapiens
  source 1..21: mol_type = other DNA
aaaaagaagaaaaagaagtca

SEQ ID NO: 6956 - DNA, 21 bp, Homo sapiens
  source 1..21: mol_type = other DNA
aaaagaagaaaaagaagtcaa

SEQ ID NO: 6957 - DNA, 21 bp, Homo sapiens
  source 1..21: mol_type = other DNA
aaagaagaaaaagaagtcaaa

SEQ ID NO: 6958 - DNA, 21 bp, Homo sapiens
  source 1..21: mol_type = other DNA
tcaaagacaaagtgtgtaatt

SEQ ID NO: 6959 - DNA, 21 bp, Homo sapiens
  source 1..21: mol_type = other DNA
caaagacaaagtgtgtaatta

SEQ ID NO: 6960 - DNA, 21 bp, Homo sapiens
  source 1..21: mol_type = other DNA
gacaaagtgtgtaattatgta

SEQ ID NO: 6961 - DNA, 21 bp, Homo sapiens
  source 1..21: mol_type = other DNA
caaagtgtgtaattatgtaaa

SEQ ID NO: 6962 - DNA, 21 bp, Homo sapiens
  source 1..21: mol_type = other DNA
gtgtgtaattatgtaaataca

SEQ ID NO: 6963 - DNA, 21 bp, Homo sapiens
  source 1..21: mol_type = other DNA
gtgtaattatgtaaatacaat

SEQ ID NO: 6964 - DNA, 21 bp, Homo sapiens
  source 1..21: mol_type = other DNA
gtaattatgtaaatacaattt

SEQ ID NO: 6965 - DNA, 21 bp, Homo sapiens
  source 1..21: mol_type = other DNA
taattatgtaaatacaatttg

SEQ ID NO: 6966 - DNA, 21 bp, Homo sapiens
  source 1..21: mol_type = other DNA
tatgtaaatacaatttgtact

SEQ ID NO: 6967 - DNA, 21 bp, Homo sapiens
  source 1..21: mol_type = other DNA
atgtaaatacaatttgtactt

SEQ ID NO: 6968 - DNA, 21 bp, Homo sapiens
  source 1..21: mol_type = other DNA
tgtaaatacaatttgtacttt

SEQ ID NO: 6969 - DNA, 21 bp, Homo sapiens
  source 1..21: mol_type = other DNA
gtaaatacaatttgtactttt

SEQ ID NO: 6970 - DNA, 21 bp, Homo sapiens
  source 1..21: mol_type = other DNA
acaatttgtacttttttctta

SEQ ID NO: 6971 - DNA, 21 bp, Homo sapiens
  source 1..21: mol_type = other DNA
caatttgtacttttttcttaa

SEQ ID NO: 6972 - DNA, 21 bp, Homo sapiens
  source 1..21: mol_type = other DNA
tactagtacaagtggtaattt

SEQ ID NO: 6973 - DNA, 21 bp, Homo sapiens
  source 1..21: mol_type = other DNA
actagtacaagtggtaatttt

SEQ ID NO: 6974 - DNA, 21 bp, Homo sapiens
  source 1..21: mol_type = other DNA
acaagtggtaatttttgtaca

SEQ ID NO: 6975 - DNA, 21 bp, Homo sapiens
  source 1..21: mol_type = other DNA
caagtggtaatttttgtacat

SEQ ID NO: 6976 - DNA, 21 bp, Homo sapiens
  source 1..21: mol_type = other DNA
taatttttgtacattacacta

SEQ ID NO: 6977 - DNA, 21 bp, Homo sapiens
  source 1..21: mol_type = other DNA
aatttttgtacattacactaa

SEQ ID NO: 6978 - DNA, 21 bp, Homo sapiens
  source 1..21: mol_type = other DNA
atttttgtacattacactaaa

SEQ ID NO: 6979 - DNA, 21 bp, Homo sapiens
  source 1..21: mol_type = other DNA
tttttgtacattacactaaat

SEQ ID NO: 6980 - DNA, 21 bp, Homo sapiens
  source 1..21: mol_type = other DNA
ttttgtacattacactaaatt

SEQ ID NO: 6981 - DNA, 21 bp, Homo sapiens
  source 1..21: mol_type = other DNA
cactaaattattagcatttgt

SEQ ID NO: 6982 - DNA, 21 bp, Homo sapiens
  source 1..21: mol_type = other DNA
ctaaattattagcatttgttt

SEQ ID NO: 6983 - DNA, 21 bp, Homo sapiens
  source 1..21: mol_type = other DNA
taaattattagcatttgtttt

SEQ ID NO: 6984 - DNA, 21 bp, Homo sapiens
  source 1..21: mol_type = other DNA
tattagcatttgttttagcat

SEQ ID NO: 6985 - DNA, 21 bp, Homo sapiens
  source 1..21: mol_type = other DNA
catttgttttagcattaccta

SEQ ID NO: 6986 - DNA, 21 bp, Homo sapiens
  source 1..21: mol_type = other DNA
atttgttttagcattacctaa

SEQ ID NO: 6987 - DNA, 21 bp, Homo sapiens
  source 1..21: mol_type = other DNA
ttgttttagcattacctaatt

SEQ ID NO: 6988 - DNA, 21 bp, Homo sapiens
  source 1..21: mol_type = other DNA
tgttttagcattacctaattt

SEQ ID NO: 6989 - DNA, 21 bp, Homo sapiens
  source 1..21: mol_type = other DNA
gttttagcattacctaatttt

SEQ ID NO: 6990 - DNA, 21 bp, Homo sapiens
  source 1..21: mol_type = other DNA
ttttagcattacctaattttt

SEQ ID NO: 6991 - DNA, 21 bp, Homo sapiens
  source 1..21: mol_type = other DNA
gactgttagcttttaccttaa

SEQ ID NO: 6992 - DNA, 21 bp, Homo sapiens
  source 1..21: mol_type = other DNA
actgttagcttttaccttaaa

SEQ ID NO: 6993 - DNA, 21 bp, Homo sapiens
  source 1..21: mol_type = other DNA
agcttttaccttaaatgctta

SEQ ID NO: 6994 - DNA, 21 bp, Homo sapiens
  source 1..21: mol_type = other DNA
gcttttaccttaaatgcttat

SEQ ID NO: 6995 - DNA, 21 bp, Homo sapiens
  source 1..21: mol_type = other DNA
cttttaccttaaatgcttatt

SEQ ID NO: 6996 - DNA, 21 bp, Homo sapiens
  source 1..21: mol_type = other DNA
ccttaaatgcttattttaaaa

SEQ ID NO: 6997 - DNA, 21 bp, Homo sapiens
  source 1..21: mol_type = other DNA
cttaaatgcttattttaaaat

SEQ ID NO: 6998 - DNA, 21 bp, Homo sapiens
  source 1..21: mol_type = other DNA
tgcttattttaaaatgacagt

SEQ ID NO: 6999 - DNA, 21 bp, Homo sapiens
  source 1..21: mol_type = other DNA
cttattttaaaatgacagtgg

SEQ ID NO: 7000 - DNA, 21 bp, Homo sapiens
  source 1..21: mol_type = other DNA
gtggaagtttttttttcctct

SEQ ID NO: 7001 - DNA, 21 bp, Homo sapiens
  source 1..21: mol_type = other DNA
ggaagtttttttttcctctaa

SEQ ID NO: 7002 - DNA, 21 bp, Homo sapiens
  source 1..21: mol_type = other DNA
gaagtttttttttcctctaag

SEQ ID NO: 7003 - DNA, 21 bp, Homo sapiens
  source 1..21: mol_type = other DNA
ttttggtttttgaactagcaa

SEQ ID NO: 7004 - DNA, 21 bp, Homo sapiens
  source 1..21: mol_type = other DNA
gcctgtgaaaaagaaactgaa

SEQ ID NO: 7005 - DNA, 21 bp, Homo sapiens
  source 1..21: mol_type = other DNA
aaaaagaaactgaatacctaa

SEQ ID NO: 7006 - DNA, 21 bp, Homo sapiens
  source 1..21: mol_type = other DNA
aaaagaaactgaatacctaag

SEQ ID NO: 7007 - DNA, 21 bp, Homo sapiens
  source 1..21: mol_type = other DNA
aactgaatacctaagatttct

SEQ ID NO: 7008 - DNA, 21 bp, Homo sapiens
  source 1..21: mol_type = other DNA
tgcagttgattacttcttatt

SEQ ID NO: 7009 - DNA, 21 bp, Homo sapiens
  source 1..21: mol_type = other DNA
gcagttgattacttcttattt

SEQ ID NO: 7010 - DNA, 21 bp, Homo sapiens
  source 1..21: mol_type = other DNA
ttgattacttcttatttttct

SEQ ID NO: 7011 - DNA, 21 bp, Homo sapiens
  source 1..21: mol_type = other DNA
ttcttatttttcttaccaatt

SEQ ID NO: 7012 - DNA, 21 bp, Homo sapiens
  source 1..21: mol_type = other DNA
tcttatttttcttaccaattg

SEQ ID NO: 7013 - DNA, 21 bp, Homo sapiens
  source 1..21: mol_type = other DNA
cttatttttcttaccaattgt

SEQ ID NO: 7014 - DNA, 21 bp, Homo sapiens
  source 1..21: mol_type = other DNA
atgttggtgtgaaacaaatta

SEQ ID NO: 7015 - DNA, 21 bp, Homo sapiens
  source 1..21: mol_type = other DNA
ttggtgtgaaacaaattaatg

SEQ ID NO: 7016 - DNA, 21 bp, Homo sapiens
  source 1..21: mol_type = other DNA
tggtgtgaaacaaattaatga

SEQ ID NO: 7017 - DNA, 21 bp, Homo sapiens
  source 1..21: mol_type = other DNA
aacaaattaatgaagcttttg

SEQ ID NO: 7018 - DNA, 21 bp, Homo sapiens
  source 1..21: mol_type = other DNA
acaaattaatgaagcttttga

SEQ ID NO: 7019 - DNA, 21 bp, Homo sapiens
  source 1..21: mol_type = other DNA
tctgtgttttatctagtcaca

SEQ ID NO: 7020 - DNA, 21 bp, Homo sapiens
  source 1..21: mol_type = other DNA
ctgtgttttatctagtcacat

SEQ ID NO: 7021 - DNA, 21 bp, Homo sapiens
  source 1..21: mol_type = other DNA
tgttttatctagtcacataaa

SEQ ID NO: 7022 - DNA, 21 bp, Homo sapiens
  source 1..21: mol_type = other DNA
gttttatctagtcacataaat

SEQ ID NO: 7023 - DNA, 21 bp, Homo sapiens
  source 1..21: mol_type = other DNA
atctagtcacataaatggatt

SEQ ID NO: 7024 - DNA, 21 bp, Homo sapiens
  source 1..21: mol_type = other DNA
tctagtcacataaatggatta

SEQ ID NO: 7025 - DNA, 21 bp, Homo sapiens
  source 1..21: mol_type = other DNA
cataaatggattaattactaa

SEQ ID NO: 7026 - DNA, 21 bp, Homo sapiens
  source 1..21: mol_type = other DNA
ataaatggattaattactaat

SEQ ID NO: 7027 - DNA, 21 bp, Homo sapiens
  source 1..21: mol_type = other DNA
tggattaattactaatttcag

SEQ ID NO: 7028 - DNA, 21 bp, Homo sapiens
  source 1..21: mol_type = other DNA
gattaattactaatttcagtt

SEQ ID NO: 7029 - DNA, 21 bp, Homo sapiens
  source 1..21: mol_type = other DNA
attaattactaatttcagttg

SEQ ID NO: 7030 - DNA, 21 bp, Homo sapiens
  source 1..21: mol_type = other DNA
ttaattactaatttcagttga

SEQ ID NO: 7031 - DNA, 21 bp, Homo sapiens
  source 1..21: mol_type = other DNA
taattggtttttactgaaaca

SEQ ID NO: 7032 - DNA, 21 bp, Homo sapiens
  source 1..21: mol_type = other DNA
tggtttttactgaaacattga

SEQ ID NO: 7033 - DNA, 21 bp, Homo sapiens
  source 1..21: mol_type = other DNA
ggtttttactgaaacattgag

SEQ ID NO: 7034 - DNA, 21 bp, Homo sapiens
  source 1..21: mol_type = other DNA
attgagggaacacaaatttat

SEQ ID NO: 7035 - DNA, 21 bp, Homo sapiens
  source 1..21: mol_type = other DNA
ttgagggaacacaaatttatg

SEQ ID NO: 7036 - DNA, 21 bp, Homo sapiens
  source 1..21: mol_type = other DNA
tgatgaatgtaaagttacact

SEQ ID NO: 7037 - DNA, 21 bp, Homo sapiens
  source 1..21: mol_type = other DNA
gatgaatgtaaagttacactg

SEQ ID NO: 7038 - DNA, 21 bp, Homo sapiens
  source 1..21: mol_type = other DNA
ccaaaatattatattttttct

SEQ ID NO: 7039 - DNA, 21 bp, Homo sapiens
  source 1..21: mol_type = other DNA
caaaatattatattttttcta

SEQ ID NO: 7040 - DNA, 21 bp, Homo sapiens
  source 1..21: mol_type = other DNA
aaaatattatattttttctat

SEQ ID NO: 7041 - DNA, 21 bp, Homo sapiens
  source 1..21: mol_type = other DNA
aaatattatattttttctata

SEQ ID NO: 7042 - DNA, 21 bp, Homo sapiens
  source 1..21: mol_type = other DNA
atattatattttttctataaa

SEQ ID NO: 7043 - DNA, 21 bp, Homo sapiens
  source 1..21: mol_type = other DNA
tattatattttttctataaaa

SEQ ID NO: 7044 - DNA, 21 bp, Homo sapiens
  source 1..21: mol_type = other DNA
attatattttttctataaaaa

SEQ ID NO: 7045 - DNA, 21 bp, Homo sapiens
  source 1..21: mol_type = other DNA
ttatattttttctataaaaag

SEQ ID NO: 7046 - DNA, 21 bp, Homo sapiens
  source 1..21: mol_type = other DNA
tatattttttctataaaaaga

SEQ ID NO: 7047 - DNA, 21 bp, Homo sapiens
  source 1..21: mol_type = other DNA
atattttttctataaaaagaa

SEQ ID NO: 7048 - DNA, 21 bp, Homo sapiens
  source 1..21: mol_type = other DNA
tattttttctataaaaagaaa

SEQ ID NO: 7049 - DNA, 21 bp, Homo sapiens
  source 1..21: mol_type = other DNA
attttttctataaaaagaaaa

SEQ ID NO: 7050 - DNA, 21 bp, Homo sapiens
  source 1..21: mol_type = other DNA
ttctataaaaagaaaaaaatg

SEQ ID NO: 7051 - DNA, 21 bp, Homo sapiens
  source 1..21: mol_type = other DNA
tctataaaaagaaaaaaatgg

SEQ ID NO: 7052 - DNA, 21 bp, Homo sapiens
  source 1..21: mol_type = other DNA
tataaaaagaaaaaaatggaa

SEQ ID NO: 7053 - DNA, 21 bp, Homo sapiens
  source 1..21: mol_type = other DNA
ataaaaagaaaaaaatggaaa

SEQ ID NO: 7054 - DNA, 21 bp, Homo sapiens
  source 1..21: mol_type = other DNA
taaaaagaaaaaaatggaaaa

SEQ ID NO: 7055 - DNA, 21 bp, Homo sapiens
  source 1..21: mol_type = other DNA
aaaaagaaaaaaatggaaaaa

SEQ ID NO: 7056 - DNA, 21 bp, Homo sapiens
  source 1..21: mol_type = other DNA
aaaagaaaaaaatggaaaaaa

SEQ ID NO: 7057 - DNA, 21 bp, Homo sapiens
  source 1..21: mol_type = other DNA
aaagaaaaaaatggaaaaaaa

SEQ ID NO: 7058 - DNA, 21 bp, Homo sapiens
  source 1..21: mol_type = other DNA
aagaaaaaaatggaaaaaaat

SEQ ID NO: 7059 - DNA, 21 bp, Homo sapiens
  source 1..21: mol_type = other DNA
aaaaaatggaaaaaaattaca

SEQ ID NO: 7060 - DNA, 21 bp, Homo sapiens
  source 1..21: mol_type = other DNA
aaaaatggaaaaaaattacaa

SEQ ID NO: 7061 - DNA, 21 bp, Homo sapiens
  source 1..21: mol_type = other DNA
tggaaaaaaattacaaggcaa

SEQ ID NO: 7062 - DNA, 21 bp, Homo sapiens
  source 1..21: mol_type = other DNA
ggaaaaaaattacaaggcaat

SEQ ID NO: 7063 - DNA, 21 bp, Homo sapiens
  source 1..21: mol_type = other DNA
gaaaaaaattacaaggcaatg

SEQ ID NO: 7064 - DNA, 21 bp, Homo sapiens
  source 1..21: mol_type = other DNA
gccatttccttttcacattag

SEQ ID NO: 7065 - DNA, 21 bp, Homo sapiens
  source 1..21: mol_type = other DNA
tccttttcacattagataaat

SEQ ID NO: 7066 - DNA, 21 bp, Homo sapiens
  source 1..21: mol_type = other DNA
cacattagataaattactata

SEQ ID NO: 7067 - DNA, 21 bp, Homo sapiens
  source 1..21: mol_type = other DNA
acattagataaattactataa

SEQ ID NO: 7068 - DNA, 21 bp, Homo sapiens
  source 1..21: mol_type = other DNA
cattagataaattactataaa

SEQ ID NO: 7069 - DNA, 21 bp, Homo sapiens
  source 1..21: mol_type = other DNA
agtatgaaatggggattatta

SEQ ID NO: 7070 - DNA, 21 bp, Homo sapiens
  source 1..21: mol_type = other DNA
tggggattattatagcaacca

SEQ ID NO: 7071 - DNA, 21 bp, Homo sapiens
  source 1..21: mol_type = other DNA
ggctatatttacatgctacta

SEQ ID NO: 7072 - DNA, 21 bp, Homo sapiens
  source 1..21: mol_type = other DNA
gctatatttacatgctactaa

SEQ ID NO: 7073 - DNA, 21 bp, Homo sapiens
  source 1..21: mol_type = other DNA
ctatatttacatgctactaaa

SEQ ID NO: 7074 - DNA, 21 bp, Homo sapiens
  source 1..21: mol_type = other DNA
tatatttacatgctactaaat

SEQ ID NO: 7075 - DNA, 21 bp, Homo sapiens
  source 1..21: mol_type = other DNA
atatttacatgctactaaatt

SEQ ID NO: 7076 - DNA, 21 bp, Homo sapiens
  source 1..21: mol_type = other DNA
tacatgctactaaatttttat

SEQ ID NO: 7077 - DNA, 21 bp, Homo sapiens
  source 1..21: mol_type = other DNA
tactaaatttttataataatt

SEQ ID NO: 7078 - DNA, 21 bp, Homo sapiens
  source 1..21: mol_type = other DNA
actaaatttttataataattg

SEQ ID NO: 7079 - DNA, 21 bp, Homo sapiens
  source 1..21: mol_type = other DNA
taaatttttataataattgaa

SEQ ID NO: 7080 - DNA, 21 bp, Homo sapiens
  source 1..21: mol_type = other DNA
aaatttttataataattgaaa

SEQ ID NO: 7081 - DNA, 21 bp, Homo sapiens
  source 1..21: mol_type = other DNA
aatttttataataattgaaaa

SEQ ID NO: 7082 - DNA, 21 bp, Homo sapiens
  source 1..21: mol_type = other DNA
atttttataataattgaaaag

SEQ ID NO: 7083 - DNA, 21 bp, Homo sapiens
  source 1..21: mol_type = other DNA
tttttataataattgaaaaga

SEQ ID NO: 7084 - DNA, 21 bp, Homo sapiens
  source 1..21: mol_type = other DNA
ttttataataattgaaaagat

SEQ ID NO: 7085 - DNA, 21 bp, Homo sapiens
  source 1..21: mol_type = other DNA
tttataataattgaaaagatt

SEQ ID NO: 7086 - DNA, 21 bp, Homo sapiens
  source 1..21: mol_type = other DNA
ttataataattgaaaagattt

SEQ ID NO: 7087 - DNA, 21 bp, Homo sapiens
  source 1..21: mol_type = other DNA
tataataattgaaaagatttt

SEQ ID NO: 7088 - DNA, 21 bp, Homo sapiens
  source 1..21: mol_type = other DNA
ataattgaaaagattttaaca

SEQ ID NO: 7089 - DNA, 21 bp, Homo sapiens
  source 1..21: mol_type = other DNA
taattgaaaagattttaacaa

SEQ ID NO: 7090 - DNA, 21 bp, Homo sapiens
  source 1..21: mol_type = other DNA
attgaaaagattttaacaagt

SEQ ID NO: 7091 - DNA, 21 bp, Homo sapiens
  source 1..21: mol_type = other DNA
ttgaaaagattttaacaagta

SEQ ID NO: 7092 - DNA, 21 bp, Homo sapiens
  source 1..21: mol_type = other DNA
tgaaaagattttaacaagtat

SEQ ID NO: 7093 - DNA, 21 bp, Homo sapiens
  source 1..21: mol_type = other DNA
gaaaagattttaacaagtata

SEQ ID NO: 7094 - DNA, 21 bp, Homo sapiens
  source 1..21: mol_type = other DNA
aaaagattttaacaagtataa

SEQ ID NO: 7095 - DNA, 21 bp, Homo sapiens
  source 1..21: mol_type = other DNA
aaagattttaacaagtataaa

SEQ ID NO: 7096 - DNA, 21 bp, Homo sapiens
  source 1..21: mol_type = other DNA
aagattttaacaagtataaaa

SEQ ID NO: 7097 - DNA, 21 bp, Homo sapiens
  source 1..21: mol_type = other DNA
agattttaacaagtataaaaa

SEQ ID NO: 7098 - DNA, 21 bp, Homo sapiens
  source 1..21: mol_type = other DNA
gattttaacaagtataaaaaa

SEQ ID NO: 7099 - DNA, 21 bp, Homo sapiens
  source 1..21: mol_type = other DNA
acaagtataaaaaattctcat

SEQ ID NO: 7100 - DNA, 21 bp, Homo sapiens
  source 1..21: mol_type = other DNA
caagtataaaaaattctcata

SEQ ID NO: 7101 - DNA, 21 bp, Homo sapiens
  source 1..21: mol_type = other DNA
aagtataaaaaattctcatag

SEQ ID NO: 7102 - DNA, 21 bp, Homo sapiens
  source 1..21: mol_type = other DNA
agtataaaaaattctcatagg

SEQ ID NO: 7103 - DNA, 21 bp, Homo sapiens
  source 1..21: mol_type = other DNA
gtataaaaaattctcatagga

SEQ ID NO: 7104 - DNA, 21 bp, Homo sapiens
  source 1..21: mol_type = other DNA
tataaaaaattctcataggaa

SEQ ID NO: 7105 - DNA, 21 bp, Homo sapiens
  source 1..21: mol_type = other DNA
ataaaaaattctcataggaat

SEQ ID NO: 7106 - DNA, 21 bp, Homo sapiens
  source 1..21: mol_type = other DNA
taaaaaattctcataggaatt

SEQ ID NO: 7107 - DNA, 21 bp, Homo sapiens
  source 1..21: mol_type = other DNA
aaaaattctcataggaattaa

SEQ ID NO: 7108 - DNA, 21 bp, Homo sapiens
  source 1..21: mol_type = other DNA
aaaattctcataggaattaaa

SEQ ID NO: 7109 - DNA, 21 bp, Homo sapiens
  source 1..21: mol_type = other DNA
ctctttcatagtataacttta

SEQ ID NO: 7110 - DNA, 21 bp, Homo sapiens
  source 1..21: mol_type = other DNA
tcatagtataactttaaatct

SEQ ID NO: 7111 - DNA, 21 bp, Homo sapiens
  source 1..21: mol_type = other DNA
catagtataactttaaatctt

SEQ ID NO: 7112 - DNA, 21 bp, Homo sapiens
  source 1..21: mol_type = other DNA
tttaaatcttttcttcaactt

SEQ ID NO: 7113 - DNA, 21 bp, Homo sapiens
  source 1..21: mol_type = other DNA
ttaaatcttttcttcaacttg

SEQ ID NO: 7114 - DNA, 21 bp, Homo sapiens
  source 1..21: mol_type = other DNA
aacttgagtctttgaagatag

SEQ ID NO: 7115 - DNA, 21 bp, Homo sapiens
  source 1..21: mol_type = other DNA
cttgagtctttgaagatagtt

SEQ ID NO: 7116 - DNA, 21 bp, Homo sapiens
  source 1..21: mol_type = other DNA
ttgagtctttgaagatagttt

SEQ ID NO: 7117 - DNA, 21 bp, Homo sapiens
  source 1..21: mol_type = other DNA
aagatagttttaattctgctt

SEQ ID NO: 7118 - DNA, 21 bp, Homo sapiens
  source 1..21: mol_type = other DNA
agatagttttaattctgcttg

SEQ ID NO: 7119 - DNA, 21 bp, Homo sapiens
  source 1..21: mol_type = other DNA
gatagttttaattctgcttgt

SEQ ID NO: 7120 - DNA, 21 bp, Homo sapiens
  source 1..21: mol_type = other DNA
tgcttgtgacattaaaagatt

SEQ ID NO: 7121 - DNA, 21 bp, Homo sapiens
  source 1..21: mol_type = other DNA
agcattgcttttgtttcttaa

SEQ ID NO: 7122 - DNA, 21 bp, Homo sapiens
  source 1..21: mol_type = other DNA
gcattgcttttgtttcttaag

SEQ ID NO: 7123 - DNA, 21 bp, Homo sapiens
  source 1..21: mol_type = other DNA
cttttgtttcttaagaaaaca

SEQ ID NO: 7124 - DNA, 21 bp, Homo sapiens
  source 1..21: mol_type = other DNA
ttcttaagaaaacaaactctt

SEQ ID NO: 7125 - DNA, 21 bp, Homo sapiens
  source 1..21: mol_type = other DNA
tcttaagaaaacaaactcttt

SEQ ID NO: 7126 - DNA, 21 bp, Homo sapiens
  source 1..21: mol_type = other DNA
cttaagaaaacaaactctttt

SEQ ID NO: 7127 - DNA, 21 bp, Homo sapiens
  source 1..21: mol_type = other DNA
ttaagaaaacaaactcttttt

SEQ ID NO: 7128 - DNA, 21 bp, Homo sapiens
  source 1..21: mol_type = other DNA
taagaaaacaaactctttttt

SEQ ID NO: 7129 - DNA, 21 bp, Homo sapiens
  source 1..21: mol_type = other DNA
aagaaaacaaactctttttta

SEQ ID NO: 7130 - DNA, 21 bp, Homo sapiens
  source 1..21: mol_type = other DNA
agaaaacaaactcttttttaa

SEQ ID NO: 7131 - DNA, 21 bp, Homo sapiens
  source 1..21: mol_type = other DNA
aacaaactcttttttaaaaat

SEQ ID NO: 7132 - DNA, 21 bp, Homo sapiens
  source 1..21: mol_type = other DNA
ctcttttttaaaaattacttt

SEQ ID NO: 7133 - DNA, 21 bp, Homo sapiens
  source 1..21: mol_type = other DNA
tcttttttaaaaattactttt

SEQ ID NO: 7134 - DNA, 21 bp, Homo sapiens
  source 1..21: mol_type = other DNA
cttttttaaaaattactttta

SEQ ID NO: 7135 - DNA, 21 bp, Homo sapiens
  source 1..21: mol_type = other DNA
ttttttaaaaattacttttaa

SEQ ID NO: 7136 - DNA, 21 bp, Homo sapiens
  source 1..21: mol_type = other DNA
tttttaaaaattacttttaaa

SEQ ID NO: 7137 - DNA, 21 bp, Homo sapiens
  source 1..21: mol_type = other DNA
ttttaaaaattacttttaaat

SEQ ID NO: 7138 - DNA, 21 bp, Homo sapiens
  source 1..21: mol_type = other DNA
tttaaaaattacttttaaata

SEQ ID NO: 7139 - DNA, 21 bp, Homo sapiens
  source 1..21: mol_type = other DNA
ttaaaaattacttttaaatat

SEQ ID NO: 7140 - DNA, 21 bp, Homo sapiens
  source 1..21: mol_type = other DNA
taaaaattacttttaaatatt

SEQ ID NO: 7141 - DNA, 21 bp, Homo sapiens
  source 1..21: mol_type = other DNA
tacttttaaatattaactcaa

SEQ ID NO: 7142 - DNA, 21 bp, Homo sapiens
  source 1..21: mol_type = other DNA
acttttaaatattaactcaaa

SEQ ID NO: 7143 - DNA, 21 bp, Homo sapiens
  source 1..21: mol_type = other DNA
ttttaaatattaactcaaaag

SEQ ID NO: 7144 - DNA, 21 bp, Homo sapiens
  source 1..21: mol_type = other DNA
ttaaatattaactcaaaagtt

SEQ ID NO: 7145 - DNA, 21 bp, Homo sapiens
  source 1..21: mol_type = other DNA
taaatattaactcaaaagttg

SEQ ID NO: 7146 - DNA, 21 bp, Homo sapiens
  source 1..21: mol_type = other DNA
aaatattaactcaaaagttga

SEQ ID NO: 7147 - DNA, 21 bp, Homo sapiens
  source 1..21: mol_type = other DNA
aatattaactcaaaagttgag

SEQ ID NO: 7148 - DNA, 21 bp, Homo sapiens
  source 1..21: mol_type = other DNA
ggtgtgccaagacattaattt

SEQ ID NO: 7149 - DNA, 21 bp, Homo sapiens
  source 1..21: mol_type = other DNA
gccaagacattaatttttttt

SEQ ID NO: 7150 - DNA, 21 bp, Homo sapiens
  source 1..21: mol_type = other DNA
ccaagacattaattttttttt

SEQ ID NO: 7151 - DNA, 21 bp, Homo sapiens
  source 1..21: mol_type = other DNA
cattaattttttttttaaaca

SEQ ID NO: 7152 - DNA, 21 bp, Homo sapiens
  source 1..21: mol_type = other DNA
attaattttttttttaaacaa

SEQ ID NO: 7153 - DNA, 21 bp, Homo sapiens
  source 1..21: mol_type = other DNA
taattttttttttaaacaatg

SEQ ID NO: 7154 - DNA, 21 bp, Homo sapiens
  source 1..21: mol_type = other DNA
attttttttttaaacaatgaa

SEQ ID NO: 7155 - DNA, 21 bp, Homo sapiens
  source 1..21: mol_type = other DNA
ttttttttttaaacaatgaag

SEQ ID NO: 7156 - DNA, 21 bp, Homo sapiens
  source 1..21: mol_type = other DNA
tttttttttaaacaatgaagt

SEQ ID NO: 7157 - DNA, 21 bp, Homo sapiens
  source 1..21: mol_type = other DNA
ttttttttaaacaatgaagtg

SEQ ID NO: 7158 - DNA, 21 bp, Homo sapiens
  source 1..21: mol_type = other DNA
tttttttaaacaatgaagtga

SEQ ID NO: 7159 - DNA, 21 bp, Homo sapiens
  source 1..21: mol_type = other DNA
tttttaaacaatgaagtgaaa

SEQ ID NO: 7160 - DNA, 21 bp, Homo sapiens
  source 1..21: mol_type = other DNA
ttttaaacaatgaagtgaaaa

SEQ ID NO: 7161 - DNA, 21 bp, Homo sapiens
  source 1..21: mol_type = other DNA
tttaaacaatgaagtgaaaaa

SEQ ID NO: 7162 - DNA, 21 bp, Homo sapiens
  source 1..21: mol_type = other DNA
atgaagtgaaaaagttttaca

SEQ ID NO: 7163 - DNA, 21 bp, Homo sapiens
  source 1..21: mol_type = other DNA
tgaaaaagttttacaatctct

SEQ ID NO: 7164 - DNA, 21 bp, Homo sapiens
  source 1..21: mol_type = other DNA
gaaaaagttttacaatctcta

SEQ ID NO: 7165 - DNA, 21 bp, Homo sapiens
  source 1..21: mol_type = other DNA
aaaaagttttacaatctctag

SEQ ID NO: 7166 - DNA, 21 bp, Homo sapiens
  source 1..21: mol_type = other DNA
actggttaaattaacattgca

SEQ ID NO: 7167 - DNA, 21 bp, Homo sapiens
  source 1..21: mol_type = other DNA
ctggttaaattaacattgcat

SEQ ID NO: 7168 - DNA, 21 bp, Homo sapiens
  source 1..21: mol_type = other DNA
tggttaaattaacattgcata

SEQ ID NO: 7169 - DNA, 21 bp, Homo sapiens
  source 1..21: mol_type = other DNA
acattgcataaacacttttca

SEQ ID NO: 7170 - DNA, 21 bp, Homo sapiens
  source 1..21: mol_type = other DNA
tcaagtctgatccatatttaa

SEQ ID NO: 7171 - DNA, 21 bp, Homo sapiens
  source 1..21: mol_type = other DNA
tccatatttaataatgcttta

SEQ ID NO: 7172 - DNA, 21 bp, Homo sapiens
  source 1..21: mol_type = other DNA
ccatatttaataatgctttaa

SEQ ID NO: 7173 - DNA, 21 bp, Homo sapiens
  source 1..21: mol_type = other DNA
catatttaataatgctttaaa

SEQ ID NO: 7174 - DNA, 21 bp, Homo sapiens
  source 1..21: mol_type = other DNA
atatttaataatgctttaaaa

SEQ ID NO: 7175 - DNA, 21 bp, Homo sapiens
  source 1..21: mol_type = other DNA
tatttaataatgctttaaaat

SEQ ID NO: 7176 - DNA, 21 bp, Homo sapiens
  source 1..21: mol_type = other DNA
atttaataatgctttaaaata

SEQ ID NO: 7177 - DNA, 21 bp, Homo sapiens
  source 1..21: mol_type = other DNA
ttaataatgctttaaaataaa

SEQ ID NO: 7178 - DNA, 21 bp, Homo sapiens
  source 1..21: mol_type = other DNA
taataatgctttaaaataaaa

SEQ ID NO: 7179 - DNA, 21 bp, Homo sapiens
  source 1..21: mol_type = other DNA
aataatgctttaaaataaaaa

SEQ ID NO: 7180 - DNA, 21 bp, Homo sapiens
  source 1..21: mol_type = other DNA
ataatgctttaaaataaaaat

SEQ ID NO: 7181 - DNA, 21 bp, Homo sapiens
  source 1..21: mol_type = other DNA
tttaaaataaaaataaaaaca

SEQ ID NO: 7182 - DNA, 21 bp, Homo sapiens
  source 1..21: mol_type = other DNA
ataaaaataaaaacaatcctt

SEQ ID NO: 7183 - DNA, 21 bp, Homo sapiens
  source 1..21: mol_type = other DNA
taaaaataaaaacaatccttt

SEQ ID NO: 7184 - DNA, 21 bp, Homo sapiens
  source 1..21: mol_type = other DNA
aaaaataaaaacaatcctttt

SEQ ID NO: 7185 - DNA, 21 bp, Homo sapiens
  source 1..21: mol_type = other DNA
aaaataaaaacaatccttttg

SEQ ID NO: 7186 - DNA, 21 bp, Homo sapiens
  source 1..21: mol_type = other DNA
aaataaaaacaatccttttga

SEQ ID NO: 7187 - DNA, 21 bp, Homo sapiens
  source 1..21: mol_type = other DNA
aataaaaacaatccttttgat

SEQ ID NO: 7188 - DNA, 21 bp, Homo sapiens
  source 1..21: mol_type = other DNA
ataaaaacaatccttttgata

SEQ ID NO: 7189 - DNA, 21 bp, Homo sapiens
  source 1..21: mol_type = other DNA
taaaaacaatccttttgataa

SEQ ID NO: 7190 - DNA, 21 bp, Homo sapiens
  source 1..21: mol_type = other DNA
aacaatccttttgataaattt

SEQ ID NO: 7191 - DNA, 21 bp, Homo sapiens
  source 1..21: mol_type = other DNA
tccttttgataaatttaaaat

SEQ ID NO: 7192 - DNA, 21 bp, Homo sapiens
  source 1..21: mol_type = other DNA
ccttttgataaatttaaaatg

SEQ ID NO: 7193 - DNA, 21 bp, Homo sapiens
  source 1..21: mol_type = other DNA
cttttgataaatttaaaatgt

SEQ ID NO: 7194 - DNA, 21 bp, Homo sapiens
  source 1..21: mol_type = other DNA
tgataaatttaaaatgttact

SEQ ID NO: 7195 - DNA, 21 bp, Homo sapiens
  source 1..21: mol_type = other DNA
gataaatttaaaatgttactt

SEQ ID NO: 7196 - DNA, 21 bp, Homo sapiens
  source 1..21: mol_type = other DNA
ataaatttaaaatgttactta

SEQ ID NO: 7197 - DNA, 21 bp, Homo sapiens
  source 1..21: mol_type = other DNA
taaatttaaaatgttacttat

SEQ ID NO: 7198 - DNA, 21 bp, Homo sapiens
  source 1..21: mol_type = other DNA
aaatttaaaatgttacttatt

SEQ ID NO: 7199 - DNA, 21 bp, Homo sapiens
  source 1..21: mol_type = other DNA
aatttaaaatgttacttattt

SEQ ID NO: 7200 - DNA, 21 bp, Homo sapiens
  source 1..21: mol_type = other DNA
tttaaaatgttacttatttta

SEQ ID NO: 7201 - DNA, 21 bp, Homo sapiens
  source 1..21: mol_type = other DNA
ttaaaatgttacttattttaa

SEQ ID NO: 7202 - DNA, 21 bp, Homo sapiens
  source 1..21: mol_type = other DNA
taaaatgttacttattttaaa

SEQ ID NO: 7203 - DNA, 21 bp, Homo sapiens
  source 1..21: mol_type = other DNA
aaaatgttacttattttaaaa

SEQ ID NO: 7204 - DNA, 21 bp, Homo sapiens
  source 1..21: mol_type = other DNA
aaatgttacttattttaaaat

SEQ ID NO: 7205 - DNA, 21 bp, Homo sapiens
  source 1..21: mol_type = other DNA
atgttacttattttaaaataa

SEQ ID NO: 7206 - DNA, 21 bp, Homo sapiens
  source 1..21: mol_type = other DNA
acttattttaaaataaatgaa

SEQ ID NO: 7207 - DNA, 21 bp, Homo sapiens
  source 1..21: mol_type = other DNA
ttattttaaaataaatgaagt

SEQ ID NO: 7208 - DNA, 21 bp, Homo sapiens
  source 1..21: mol_type = other DNA
tattttaaaataaatgaagtg

SEQ ID NO: 7209 - DNA, 21 bp, Homo sapiens
  source 1..21: mol_type = other DNA
tttaaaataaatgaagtgaga

SEQ ID NO: 7210 - DNA, 21 bp, Homo sapiens
  source 1..21: mol_type = other DNA
ttaaaataaatgaagtgagat

SEQ ID NO: 7211 - DNA, 21 bp, Homo sapiens
  source 1..21: mol_type = other DNA
tccatttcttcatgttaaaag

SEQ ID NO: 7212 - DNA, 21 bp, Homo sapiens
  source 1..21: mol_type = other DNA
ccatttcttcatgttaaaaga

SEQ ID NO: 7213 - DNA, 21 bp, Homo sapiens
  source 1..21: mol_type = other DNA
ctcaaactcttagtttttttt

SEQ ID NO: 7214 - DNA, 21 bp, Homo sapiens
  source 1..21: mol_type = other DNA
tagttttttttttttacaact

SEQ ID NO: 7215 - DNA, 21 bp, Homo sapiens
  source 1..21: mol_type = other DNA
agttttttttttttacaacta

SEQ ID NO: 7216 - DNA, 21 bp, Homo sapiens
  source 1..21: mol_type = other DNA
gttttttttttttacaactat

SEQ ID NO: 7217 - DNA, 21 bp, Homo sapiens
  source 1..21: mol_type = other DNA
ttttttttttttacaactatg

SEQ ID NO: 7218 - DNA, 21 bp, Homo sapiens
  source 1..21: mol_type = other DNA
tttttttttttacaactatgt

SEQ ID NO: 7219 - DNA, 21 bp, Homo sapiens
  source 1..21: mol_type = other DNA
ttttttttttacaactatgta

SEQ ID NO: 7220 - DNA, 21 bp, Homo sapiens
  source 1..21: mol_type = other DNA
tttttttttacaactatgtaa

SEQ ID NO: 7221 - DNA, 21 bp, Homo sapiens
  source 1..21: mol_type = other DNA
ttttttttacaactatgtaat

SEQ ID NO: 7222 - DNA, 21 bp, Homo sapiens
  source 1..21: mol_type = other DNA
tttttttacaactatgtaatt

SEQ ID NO: 7223 - DNA, 21 bp, Homo sapiens
  source 1..21: mol_type = other DNA
ttttttacaactatgtaattt

SEQ ID NO: 7224 - DNA, 21 bp, Homo sapiens
  source 1..21: mol_type = other DNA
tttttacaactatgtaattta

SEQ ID NO: 7225 - DNA, 21 bp, Homo sapiens
  source 1..21: mol_type = other DNA
aactatgtaatttatattcca

SEQ ID NO: 7226 - DNA, 21 bp, Homo sapiens
  source 1..21: mol_type = other DNA
actatgtaatttatattccat

SEQ ID NO: 7227 - DNA, 21 bp, Homo sapiens
  source 1..21: mol_type = other DNA
ctatgtaatttatattccatt

SEQ ID NO: 7228 - DNA, 21 bp, Homo sapiens
  source 1..21: mol_type = other DNA
aatttatattccatttacata

SEQ ID NO: 7229 - DNA, 21 bp, Homo sapiens
  source 1..21: mol_type = other DNA
atttatattccatttacataa

SEQ ID NO: 7230 - DNA, 21 bp, Homo sapiens
  source 1..21: mol_type = other DNA
tttatattccatttacataag

SEQ ID NO: 7231 - DNA, 21 bp, Homo sapiens
  source 1..21: mol_type = other DNA
ttatattccatttacataagg

SEQ ID NO: 7232 - DNA, 21 bp, Homo sapiens
  source 1..21: mol_type = other DNA
tacataaggatacacttattt

SEQ ID NO: 7233 - DNA, 21 bp, Homo sapiens
  source 1..21: mol_type = other DNA
taaggatacacttatttgtca

SEQ ID NO: 7234 - DNA, 21 bp, Homo sapiens
  source 1..21: mol_type = other DNA
atctgtaaatttttaacctat

SEQ ID NO: 7235 - DNA, 21 bp, Homo sapiens
  source 1..21: mol_type = other DNA
tctgtaaatttttaacctatg

SEQ ID NO: 7236 - DNA, 21 bp, Homo sapiens
  source 1..21: mol_type = other DNA
ctgtaaatttttaacctatgt

SEQ ID NO: 7237 - DNA, 21 bp, Homo sapiens
  source 1..21: mol_type = other DNA
tgcaagaggtgaagtttatat

SEQ ID NO: 7238 - DNA, 21 bp, Homo sapiens
  source 1..21: mol_type = other DNA
caagaggtgaagtttatattt

SEQ ID NO: 7239 - DNA, 21 bp, Homo sapiens
  source 1..21: mol_type = other DNA
aagaggtgaagtttatatttg

SEQ ID NO: 7240 - DNA, 21 bp, Homo sapiens
  source 1..21: mol_type = other DNA
gaggtgaagtttatatttgaa

SEQ ID NO: 7241 - DNA, 21 bp, Homo sapiens
  source 1..21: mol_type = other DNA
aggtgaagtttatatttgaat

SEQ ID NO: 7242 - DNA, 21 bp, Homo sapiens
  source 1..21: mol_type = other DNA
aagtttatatttgaatatcca

SEQ ID NO: 7243 - DNA, 21 bp, Homo sapiens
  source 1..21: mol_type = other DNA
acttgatgcagttttaatact

SEQ ID NO: 7244 - DNA, 21 bp, Homo sapiens
  source 1..21: mol_type = other DNA
ttgatgcagttttaatacttg

SEQ ID NO: 7245 - DNA, 21 bp, Homo sapiens
  source 1..21: mol_type = other DNA
gatttgacctaatcactaatt

SEQ ID NO: 7246 - DNA, 21 bp, Homo sapiens
  source 1..21: mol_type = other DNA
acctaatcactaattttcagg

SEQ ID NO: 7247 - DNA, 21 bp, Homo sapiens
  source 1..21: mol_type = other DNA
cagtaggatttttcaaacctg

SEQ ID NO: 7248 - DNA, 21 bp, Homo sapiens
  source 1..21: mol_type = other DNA
agtggaaggagaatttaataa

SEQ ID NO: 7249 - DNA, 21 bp, Homo sapiens
  source 1..21: mol_type = other DNA
ggaaggagaatttaataaaga

SEQ ID NO: 7250 - DNA, 21 bp, Homo sapiens
  source 1..21: mol_type = other DNA
aaggagaatttaataaagata

SEQ ID NO: 7251 - DNA, 21 bp, Homo sapiens
  source 1..21: mol_type = other DNA
aggagaatttaataaagatag

SEQ ID NO: 7252 - DNA, 21 bp, Homo sapiens
  source 1..21: mol_type = other DNA
gaatttaataaagatagtgct

SEQ ID NO: 7253 - DNA, 21 bp, Homo sapiens
  source 1..21: mol_type = other DNA
tccttaggtaatctataacta

SEQ ID NO: 7254 - DNA, 21 bp, Homo sapiens
  source 1..21: mol_type = other DNA
ccttaggtaatctataactag

SEQ ID NO: 7255 - DNA, 21 bp, Homo sapiens
  source 1..21: mol_type = other DNA
aacagtaatacattccattgt

SEQ ID NO: 7256 - DNA, 21 bp, Homo sapiens
  source 1..21: mol_type = other DNA
cagtaatacattccattgttt

SEQ ID NO: 7257 - DNA, 21 bp, Homo sapiens
  source 1..21: mol_type = other DNA
agtaatacattccattgtttt

SEQ ID NO: 7258 - DNA, 21 bp, Homo sapiens
  source 1..21: mol_type = other DNA
gtaatacattccattgtttta

SEQ ID NO: 7259 - DNA, 21 bp, Homo sapiens
  source 1..21: mol_type = other DNA
ccattgttttagtaaccagaa

SEQ ID NO: 7260 - DNA, 21 bp, Homo sapiens
  source 1..21: mol_type = other DNA
accagaaatcttcatgcaatg

SEQ ID NO: 7261 - DNA, 21 bp, Homo sapiens
  source 1..21: mol_type = other DNA
ttcatgcaatgaaaaatactt

SEQ ID NO: 7262 - DNA, 21 bp, Homo sapiens
  source 1..21: mol_type = other DNA
aatgaaaaatactttaattca

SEQ ID NO: 7263 - DNA, 21 bp, Homo sapiens
  source 1..21: mol_type = other DNA
tgaaaaatactttaattcatg

SEQ ID NO: 7264 - DNA, 21 bp, Homo sapiens
  source 1..21: mol_type = other DNA
gaaaaatactttaattcatga

SEQ ID NO: 7265 - DNA, 21 bp, Homo sapiens
  source 1..21: mol_type = other DNA
ttcatgaagcttacttttttt

SEQ ID NO: 7266 - DNA, 21 bp, Homo sapiens
  source 1..21: mol_type = other DNA
atgaagcttactttttttttt

SEQ ID NO: 7267 - DNA, 21 bp, Homo sapiens
  source 1..21: mol_type = other DNA
agcttactttttttttttggt

SEQ ID NO: 7268 - DNA, 21 bp, Homo sapiens
  source 1..21: mol_type = other DNA
tactttttttttttggtgtca

SEQ ID NO: 7269 - DNA, 21 bp, Homo sapiens
  source 1..21: mol_type = other DNA
actttttttttttggtgtcag

SEQ ID NO: 7270 - DNA, 21 bp, Homo sapiens
  source 1..21: mol_type = other DNA
aactaatttttgtatttttag

SEQ ID NO: 7271 - DNA, 21 bp, Homo sapiens
  source 1..21: mol_type = other DNA
taatttttgtatttttaggag

SEQ ID NO: 7272 - DNA, 21 bp, Homo sapiens
  source 1..21: mol_type = other DNA
ctcatttattcagcaaatatt

SEQ ID NO: 7273 - DNA, 21 bp, Homo sapiens
  source 1..21: mol_type = other DNA
catttattcagcaaatattta

SEQ ID NO: 7274 - DNA, 21 bp, Homo sapiens
  source 1..21: mol_type = other DNA
tttattcagcaaatatttatt

SEQ ID NO: 7275 - DNA, 21 bp, Homo sapiens
  source 1..21: mol_type = other DNA
tattttagttttgcaaagaag

SEQ ID NO: 7276 - DNA, 21 bp, Homo sapiens
  source 1..21: mol_type = other DNA
ctctataattgttttgctacg

SEQ ID NO: 7277 - DNA, 21 bp, Homo sapiens
  source 1..21: mol_type = other DNA
tactttatgtaaatcacttca

SEQ ID NO: 7278 - DNA, 21 bp, Homo sapiens
  source 1..21: mol_type = other DNA
actttatgtaaatcacttcat

SEQ ID NO: 7279 - DNA, 21 bp, Homo sapiens
  source 1..21: mol_type = other DNA
ctttatgtaaatcacttcatt

SEQ ID NO: 7280 - DNA, 21 bp, Homo sapiens
  source 1..21: mol_type = other DNA
tttatgtaaatcacttcattg

SEQ ID NO: 7281 - DNA, 21 bp, Homo sapiens
  source 1..21: mol_type = other DNA
ttatgtaaatcacttcattgt

SEQ ID NO: 7282 - DNA, 21 bp, Homo sapiens
  source 1..21: mol_type = other DNA
tatgtaaatcacttcattgtt

SEQ ID NO: 7283 - DNA, 21 bp, Homo sapiens
  source 1..21: mol_type = other DNA
atgtaaatcacttcattgttt

SEQ ID NO: 7284 - DNA, 21 bp, Homo sapiens
  source 1..21: mol_type = other DNA
attgttttaaaggaataaact

SEQ ID NO: 7285 - DNA, 21 bp, Homo sapiens
  source 1..21: mol_type = other DNA
ttgttttaaaggaataaactt

SEQ ID NO: 7286 - DNA, 21 bp, Homo sapiens
  source 1..21: mol_type = other DNA
ttttaaaggaataaacttgat

SEQ ID NO: 7287 - DNA, 21 bp, Homo sapiens
  source 1..21: mol_type = other DNA
tttaaaggaataaacttgatt

SEQ ID NO: 7288 - DNA, 21 bp, Homo sapiens
  source 1..21: mol_type = other DNA
ttaaaggaataaacttgatta

SEQ ID NO: 7289 - DNA, 21 bp, Homo sapiens
  source 1..21: mol_type = other DNA
aaaggaataaacttgattata

SEQ ID NO: 7290 - DNA, 21 bp, Homo sapiens
  source 1..21: mol_type = other DNA
aaggaataaacttgattatat

SEQ ID NO: 7291 - DNA, 21 bp, Homo sapiens
  source 1..21: mol_type = other DNA
aggaataaacttgattatatt

SEQ ID NO: 7292 - DNA, 21 bp, Homo sapiens
  source 1..21: mol_type = other DNA
ggaataaacttgattatattg

SEQ ID NO: 7293 - DNA, 21 bp, Homo sapiens
  source 1..21: mol_type = other DNA
gaataaacttgattatattgt

SEQ ID NO: 7294 - DNA, 21 bp, Homo sapiens
  source 1..21: mol_type = other DNA
aacttgattatattgtttttt

SEQ ID NO: 7295 - DNA, 21 bp, Homo sapiens
  source 1..21: mol_type = other DNA
acttgattatattgttttttt

SEQ ID NO: 7296 - DNA, 21 bp, Homo sapiens
  source 1..21: mol_type = other DNA
tgattatattgtttttttatt

SEQ ID NO: 7297 - DNA, 21 bp, Homo sapiens
  source 1..21: mol_type = other DNA
atattgtttttttatttggca

SEQ ID NO: 7298 - DNA, 21 bp, Homo sapiens
  source 1..21: mol_type = other DNA
tattgtttttttatttggcat

SEQ ID NO: 7299 - DNA, 21 bp, Homo sapiens
  source 1..21: mol_type = other DNA
gtttttttatttggcataact

SEQ ID NO: 7300 - DNA, 21 bp, Homo sapiens
  source 1..21: mol_type = other DNA
tttttttatttggcataactg

SEQ ID NO: 7301 - DNA, 21 bp, Homo sapiens
  source 1..21: mol_type = other DNA
gcataactgtgattcttttag

SEQ ID NO: 7302 - DNA, 21 bp, Homo sapiens
  source 1..21: mol_type = other DNA
actgtgattcttttaggacaa

SEQ ID NO: 7303 - DNA, 21 bp, Homo sapiens
  source 1..21: mol_type = other DNA
ctgtgattcttttaggacaat

SEQ ID NO: 7304 - DNA, 21 bp, Homo sapiens
  source 1..21: mol_type = other DNA
ggtgtatgtcagatattcata

SEQ ID NO: 7305 - DNA, 21 bp, Homo sapiens
  source 1..21: mol_type = other DNA
gtgtatgtcagatattcatat

SEQ ID NO: 7306 - DNA, 21 bp, Homo sapiens
  source 1..21: mol_type = other DNA
caaatgtgtaatattccagtt

SEQ ID NO: 7307 - DNA, 21 bp, Homo sapiens
  source 1..21: mol_type = other DNA
cataagtaattaaaatatact

SEQ ID NO: 7308 - DNA, 21 bp, Homo sapiens
  source 1..21: mol_type = other DNA
ataagtaattaaaatatactt

SEQ ID NO: 7309 - DNA, 21 bp, Homo sapiens
  source 1..21: mol_type = other DNA
taagtaattaaaatatactta

SEQ ID NO: 7310 - DNA, 21 bp, Homo sapiens
  source 1..21: mol_type = other DNA
aagtaattaaaatatacttaa

SEQ ID NO: 7311 - DNA, 21 bp, Homo sapiens
  source 1..21: mol_type = other DNA
agtaattaaaatatacttaaa

SEQ ID NO: 7312 - DNA, 21 bp, Homo sapiens
  source 1..21: mol_type = other DNA
gtaattaaaatatacttaaaa

SEQ ID NO: 7313 - DNA, 21 bp, Homo sapiens
  source 1..21: mol_type = other DNA
taattaaaatatacttaaaaa

SEQ ID NO: 7314 - DNA, 21 bp, Homo sapiens
  source 1..21: mol_type = other DNA
aattaaaatatacttaaaaat

SEQ ID NO: 7315 - DNA, 21 bp, Homo sapiens
  source 1..21: mol_type = other DNA
attaaaatatacttaaaaatt

SEQ ID NO: 7316 - DNA, 21 bp, Homo sapiens
  source 1..21: mol_type = other DNA
taaaatatacttaaaaattaa

SEQ ID NO: 7317 - DNA, 21 bp, Homo sapiens
  source 1..21: mol_type = other DNA
aaaatatacttaaaaattaat

SEQ ID NO: 7318 - DNA, 21 bp, Homo sapiens
  source 1..21: mol_type = other DNA
aaatatacttaaaaattaata

SEQ ID NO: 7319 - DNA, 21 bp, Homo sapiens
  source 1..21: mol_type = other DNA
aatatacttaaaaattaatag

SEQ ID NO: 7320 - DNA, 21 bp, Homo sapiens
  source 1..21: mol_type = other DNA
tacttaaaaattaatagtttt

SEQ ID NO: 7321 - DNA, 21 bp, Homo sapiens
  source 1..21: mol_type = other DNA
taaaaattaatagttttatct

SEQ ID NO: 7322 - DNA, 21 bp, Homo sapiens
  source 1..21: mol_type = other DNA
aaaaattaatagttttatctg

SEQ ID NO: 7323 - DNA, 21 bp, Homo sapiens
  source 1..21: mol_type = other DNA
aaaattaatagttttatctgg

SEQ ID NO: 7324 - DNA, 21 bp, Homo sapiens
  source 1..21: mol_type = other DNA
atctgggtacaaataaacagg

SEQ ID NO: 7325 - DNA, 21 bp, Homo sapiens
  source 1..21: mol_type = other DNA
gacaaggaaacttctatgtaa

SEQ ID NO: 7326 - DNA, 21 bp, Homo sapiens
  source 1..21: mol_type = other DNA
acaaggaaacttctatgtaaa

SEQ ID NO: 7327 - DNA, 21 bp, Homo sapiens
  source 1..21: mol_type = other DNA
caaggaaacttctatgtaaaa

SEQ ID NO: 7328 - DNA, 21 bp, Homo sapiens
  source 1..21: mol_type = other DNA
ttctatgtaaaaatcactatg

SEQ ID NO: 7329 - DNA, 21 bp, Homo sapiens
  source 1..21: mol_type = other DNA
tctatgtaaaaatcactatga

SEQ ID NO: 7330 - DNA, 21 bp, Homo sapiens
  source 1..21: mol_type = other DNA
ctatgtaaaaatcactatgat

SEQ ID NO: 7331 - DNA, 21 bp, Homo sapiens
  source 1..21: mol_type = other DNA
gtaaaaatcactatgatttct

SEQ ID NO: 7332 - DNA, 21 bp, Homo sapiens
  source 1..21: mol_type = other DNA
taaaaatcactatgatttctg

SEQ ID NO: 7333 - DNA, 21 bp, Homo sapiens
  source 1..21: mol_type = other DNA
ctatgatttctgaattgctat

SEQ ID NO: 7334 - DNA, 21 bp, Homo sapiens
  source 1..21: mol_type = other DNA
tatgatttctgaattgctatg

SEQ ID NO: 7335 - DNA, 21 bp, Homo sapiens
  source 1..21: mol_type = other DNA
tatgtgaaactacagatcttt

SEQ ID NO: 7336 - DNA, 21 bp, Homo sapiens
  source 1..21: mol_type = other DNA
atgtgaaactacagatctttg

SEQ ID NO: 7337 - DNA, 21 bp, Homo sapiens
  source 1..21: mol_type = other DNA
agggtgttaagacttacacag

SEQ ID NO: 7338 - DNA, 21 bp, Homo sapiens
  source 1..21: mol_type = other DNA
tttaggcctcttgaatttttg

SEQ ID NO: 7339 - DNA, 21 bp, Homo sapiens
  source 1..21: mol_type = other DNA
tcttgaatttttgatgtagat

SEQ ID NO: 7340 - DNA, 21 bp, Homo sapiens
  source 1..21: mol_type = other DNA
cttgaatttttgatgtagatg

SEQ ID NO: 7341 - DNA, 21 bp, Homo sapiens
  source 1..21: mol_type = other DNA
tagatgggcatttttttaagg

SEQ ID NO: 7342 - DNA, 21 bp, Homo sapiens
  source 1..21: mol_type = other DNA
ggcatttttttaaggtagtgg

SEQ ID NO: 7343 - DNA, 21 bp, Homo sapiens
  source 1..21: mol_type = other DNA
aggtagtggttaattaccttt

SEQ ID NO: 7344 - DNA, 21 bp, Homo sapiens
  source 1..21: mol_type = other DNA
gtagtggttaattacctttat

SEQ ID NO: 7345 - DNA, 21 bp, Homo sapiens
  source 1..21: mol_type = other DNA
tagtggttaattacctttatg

SEQ ID NO: 7346 - DNA, 21 bp, Homo sapiens
  source 1..21: mol_type = other DNA
agtggttaattacctttatgt

SEQ ID NO: 7347 - DNA, 21 bp, Homo sapiens
  source 1..21: mol_type = other DNA
gtggttaattacctttatgtg

SEQ ID NO: 7348 - DNA, 21 bp, Homo sapiens
  source 1..21: mol_type = other DNA
acctttatgtgaactttgaat

SEQ ID NO: 7349 - DNA, 21 bp, Homo sapiens
  source 1..21: mol_type = other DNA
tatgtgaactttgaatggttt

SEQ ID NO: 7350 - DNA, 21 bp, Homo sapiens
  source 1..21: mol_type = other DNA
aactttgaatggtttaacaaa

SEQ ID NO: 7351 - DNA, 21 bp, Homo sapiens
  source 1..21: mol_type = other DNA
ttgaatggtttaacaaaagat

SEQ ID NO: 7352 - DNA, 21 bp, Homo sapiens
  source 1..21: mol_type = other DNA
tgaatggtttaacaaaagatt

SEQ ID NO: 7353 - DNA, 21 bp, Homo sapiens
  source 1..21: mol_type = other DNA
gaatggtttaacaaaagattt

SEQ ID NO: 7354 - DNA, 21 bp, Homo sapiens
  source 1..21: mol_type = other DNA
aatggtttaacaaaagatttg

SEQ ID NO: 7355 - DNA, 21 bp, Homo sapiens
  source 1..21: mol_type = other DNA
atggtttaacaaaagatttgt

SEQ ID NO: 7356 - DNA, 21 bp, Homo sapiens
  source 1..21: mol_type = other DNA
ggtttaacaaaagatttgttt

SEQ ID NO: 7357 - DNA, 21 bp, Homo sapiens
  source 1..21: mol_type = other DNA
gtttaacaaaagatttgtttt

SEQ ID NO: 7358 - DNA, 21 bp, Homo sapiens
  source 1..21: mol_type = other DNA
aacaaaagatttgtttttgta

SEQ ID NO: 7359 - DNA, 21 bp, Homo sapiens
  source 1..21: mol_type = other DNA
acaaaagatttgtttttgtag

SEQ ID NO: 7360 - DNA, 21 bp, Homo sapiens
  source 1..21: mol_type = other DNA
caaaagatttgtttttgtaga

SEQ ID NO: 7361 - DNA, 21 bp, Homo sapiens
  source 1..21: mol_type = other DNA
aaagatttgtttttgtagaga

SEQ ID NO: 7362 - DNA, 21 bp, Homo sapiens
  source 1..21: mol_type = other DNA
aagatttgtttttgtagagat

SEQ ID NO: 7363 - DNA, 21 bp, Homo sapiens
  source 1..21: mol_type = other DNA
agatttgtttttgtagagatt

SEQ ID NO: 7364 - DNA, 21 bp, Homo sapiens
  source 1..21: mol_type = other DNA
gatttgtttttgtagagattt

SEQ ID NO: 7365 - DNA, 21 bp, Homo sapiens
  source 1..21: mol_type = other DNA
tttttgtagagattttaaagg

SEQ ID NO: 7366 - DNA, 21 bp, Homo sapiens
  source 1..21: mol_type = other DNA
aagggggagaattctagaaat

SEQ ID NO: 7367 - DNA, 21 bp, Homo sapiens
  source 1..21: mol_type = other DNA
gggggagaattctagaaataa

SEQ ID NO: 7368 - DNA, 21 bp, Homo sapiens
  source 1..21: mol_type = other DNA
ggggagaattctagaaataaa

SEQ ID NO: 7369 - DNA, 21 bp, Homo sapiens
  source 1..21: mol_type = other DNA
gggagaattctagaaataaat

SEQ ID NO: 7370 - DNA, 21 bp, Homo sapiens
  source 1..21: mol_type = other DNA
ggagaattctagaaataaatg

SEQ ID NO: 7371 - DNA, 21 bp, Homo sapiens
  source 1..21: mol_type = other DNA
gagaattctagaaataaatgt

SEQ ID NO: 7372 - DNA, 21 bp, Homo sapiens
  source 1..21: mol_type = other DNA
ttctagaaataaatgttacct

SEQ ID NO: 7373 - DNA, 21 bp, Homo sapiens
  source 1..21: mol_type = other DNA
tctagaaataaatgttaccta

SEQ ID NO: 7374 - DNA, 21 bp, Homo sapiens
  source 1..21: mol_type = other DNA
ctagaaataaatgttacctaa

SEQ ID NO: 7375 - DNA, 21 bp, Homo sapiens
  source 1..21: mol_type = other DNA
tagaaataaatgttacctaat

SEQ ID NO: 7376 - DNA, 21 bp, Homo sapiens
  source 1..21: mol_type = other DNA
agaaataaatgttacctaatt

SEQ ID NO: 7377 - DNA, 21 bp, Homo sapiens
  source 1..21: mol_type = other DNA
aaataaatgttacctaattat

SEQ ID NO: 7378 - DNA, 21 bp, Homo sapiens
  source 1..21: mol_type = other DNA
acctaattattacagccttaa

SEQ ID NO: 7379 - DNA, 21 bp, Homo sapiens
  source 1..21: mol_type = other DNA
cctaattattacagccttaaa

SEQ ID NO: 7380 - DNA, 21 bp, Homo sapiens
  source 1..21: mol_type = other DNA
ccttaaagacaaaaatccttg

SEQ ID NO: 7381 - DNA, 21 bp, Homo sapiens
  source 1..21: mol_type = other DNA
taaagacaaaaatccttgttg

SEQ ID NO: 7382 - DNA, 21 bp, Homo sapiens
  source 1..21: mol_type = other DNA
tccttgttgaagtttttttaa

SEQ ID NO: 7383 - DNA, 21 bp, Homo sapiens
  source 1..21: mol_type = other DNA
ccttgttgaagtttttttaaa

SEQ ID NO: 7384 - DNA, 21 bp, Homo sapiens
  source 1..21: mol_type = other DNA
ttgttgaagtttttttaaaaa

SEQ ID NO: 7385 - DNA, 21 bp, Homo sapiens
  source 1..21: mol_type = other DNA
tgttgaagtttttttaaaaaa

SEQ ID NO: 7386 - DNA, 21 bp, Homo sapiens
  source 1..21: mol_type = other DNA
gaagtttttttaaaaaaagct

SEQ ID NO: 7387 - DNA, 21 bp, Homo sapiens
  source 1..21: mol_type = other DNA
aagtttttttaaaaaaagcta

SEQ ID NO: 7388 - DNA, 21 bp, Homo sapiens
  source 1..21: mol_type = other DNA
agtttttttaaaaaaagctaa

SEQ ID NO: 7389 - DNA, 21 bp, Homo sapiens
  source 1..21: mol_type = other DNA
gtttttttaaaaaaagctaaa

SEQ ID NO: 7390 - DNA, 21 bp, Homo sapiens
  source 1..21: mol_type = other DNA
tttttttaaaaaaagctaaat

SEQ ID NO: 7391 - DNA, 21 bp, Homo sapiens
  source 1..21: mol_type = other DNA
tttaaaaaaagctaaattaca

SEQ ID NO: 7392 - DNA, 21 bp, Homo sapiens
  source 1..21: mol_type = other DNA
taaaaaaagctaaattacata

SEQ ID NO: 7393 - DNA, 21 bp, Homo sapiens
  source 1..21: mol_type = other DNA
acttaggcattaacatgtttg

SEQ ID NO: 7394 - DNA, 21 bp, Homo sapiens
  source 1..21: mol_type = other DNA
cttaggcattaacatgtttgt

SEQ ID NO: 7395 - DNA, 21 bp, Homo sapiens
  source 1..21: mol_type = other DNA
agcagacgtatattgtatcat

SEQ ID NO: 7396 - DNA, 21 bp, Homo sapiens
  source 1..21: mol_type = other DNA
gacgtatattgtatcatttga

SEQ ID NO: 7397 - DNA, 21 bp, Homo sapiens
  source 1..21: mol_type = other DNA
cgtatattgtatcatttgagt

SEQ ID NO: 7398 - DNA, 21 bp, Homo sapiens
  source 1..21: mol_type = other DNA
atattgtatcatttgagtgaa

SEQ ID NO: 7399 - DNA, 21 bp, Homo sapiens
  source 1..21: mol_type = other DNA
tattgtatcatttgagtgaat

SEQ ID NO: 7400 - DNA, 21 bp, Homo sapiens
  source 1..21: mol_type = other DNA
attgtatcatttgagtgaatg

SEQ ID NO: 7401 - DNA, 21 bp, Homo sapiens
  source 1..21: mol_type = other DNA
ataggaatttagaacctaact

SEQ ID NO: 7402 - DNA, 21 bp, Homo sapiens
  source 1..21: mol_type = other DNA
taggaatttagaacctaactt

SEQ ID NO: 7403 - DNA, 21 bp, Homo sapiens
  source 1..21: mol_type = other DNA
aatttagaacctaacttttat

SEQ ID NO: 7404 - DNA, 21 bp, Homo sapiens
  source 1..21: mol_type = other DNA
atttagaacctaacttttata

SEQ ID NO: 7405 - DNA, 21 bp, Homo sapiens
  source 1..21: mol_type = other DNA
tttagaacctaacttttatag

SEQ ID NO: 7406 - DNA, 21 bp, Homo sapiens
  source 1..21: mol_type = other DNA
ttagaacctaacttttatagg

SEQ ID NO: 7407 - DNA, 21 bp, Homo sapiens
  source 1..21: mol_type = other DNA
ttttataggttatcaaaactg

SEQ ID NO: 7408 - DNA, 21 bp, Homo sapiens
  source 1..21: mol_type = other DNA
ttataggttatcaaaactgtt

SEQ ID NO: 7409 - DNA, 21 bp, Homo sapiens
  source 1..21: mol_type = other DNA
aattttgtcctaatatataca

SEQ ID NO: 7410 - DNA, 21 bp, Homo sapiens
  source 1..21: mol_type = other DNA
attttgtcctaatatatacat

SEQ ID NO: 7411 - DNA, 21 bp, Homo sapiens
  source 1..21: mol_type = other DNA
ttttgtcctaatatatacata

SEQ ID NO: 7412 - DNA, 21 bp, Homo sapiens
  source 1..21: mol_type = other DNA
cctaatatatacatagaaact

SEQ ID NO: 7413 - DNA, 21 bp, Homo sapiens
  source 1..21: mol_type = other DNA
tatatacatagaaactttgtg

SEQ ID NO: 7414 - DNA, 21 bp, Homo sapiens
  source 1..21: mol_type = other DNA
cacaagttcatctcatttgta

SEQ ID NO: 7415 - DNA, 21 bp, Homo sapiens
  source 1..21: mol_type = other DNA
ctcatttgtattccattgatt

SEQ ID NO: 7416 - DNA, 21 bp, Homo sapiens
  source 1..21: mol_type = other DNA
tcatttgtattccattgattt

SEQ ID NO: 7417 - DNA, 21 bp, Homo sapiens
  source 1..21: mol_type = other DNA
catttgtattccattgatttt

SEQ ID NO: 7418 - DNA, 21 bp, Homo sapiens
  source 1..21: mol_type = other DNA
atttgtattccattgattttt

SEQ ID NO: 7419 - DNA, 21 bp, Homo sapiens
  source 1..21: mol_type = other DNA
tttgtattccattgatttttt

SEQ ID NO: 7420 - DNA, 21 bp, Homo sapiens
  source 1..21: mol_type = other DNA
ttgtattccattgattttttt

SEQ ID NO: 7421 - DNA, 21 bp, Homo sapiens
  source 1..21: mol_type = other DNA
tgtattccattgatttttttt

SEQ ID NO: 7422 - DNA, 21 bp, Homo sapiens
  source 1..21: mol_type = other DNA
cattgattttttttttcttct

SEQ ID NO: 7423 - DNA, 21 bp, Homo sapiens
  source 1..21: mol_type = other DNA
attgattttttttttcttcta

SEQ ID NO: 7424 - DNA, 21 bp, Homo sapiens
  source 1..21: mol_type = other DNA
attttttttttcttctaaaca

SEQ ID NO: 7425 - DNA, 21 bp, Homo sapiens
  source 1..21: mol_type = other DNA
ttttttttttcttctaaacat

SEQ ID NO: 7426 - DNA, 21 bp, Homo sapiens
  source 1..21: mol_type = other DNA
tttttttttcttctaaacatt

SEQ ID NO: 7427 - DNA, 21 bp, Homo sapiens
  source 1..21: mol_type = other DNA
ttttttttcttctaaacattt

SEQ ID NO: 7428 - DNA, 21 bp, Homo sapiens
  source 1..21: mol_type = other DNA
tttttttcttctaaacatttt

SEQ ID NO: 7429 - DNA, 21 bp, Homo sapiens
  source 1..21: mol_type = other DNA
aacattttttcttcaaacagt

SEQ ID NO: 7430 - DNA, 21 bp, Homo sapiens
  source 1..21: mol_type = other DNA
acattttttcttcaaacagta

SEQ ID NO: 7431 - DNA, 21 bp, Homo sapiens
  source 1..21: mol_type = other DNA
cattttttcttcaaacagtat

SEQ ID NO: 7432 - DNA, 21 bp, Homo sapiens
  source 1..21: mol_type = other DNA
attttttcttcaaacagtata

SEQ ID NO: 7433 - DNA, 21 bp, Homo sapiens
  source 1..21: mol_type = other DNA
ttttttcttcaaacagtatat

SEQ ID NO: 7434 - DNA, 21 bp, Homo sapiens
  source 1..21: mol_type = other DNA
ttcaaacagtatataactttt

SEQ ID NO: 7435 - DNA, 21 bp, Homo sapiens
  source 1..21: mol_type = other DNA
acagtatataactttttttag

SEQ ID NO: 7436 - DNA, 21 bp, Homo sapiens
  source 1..21: mol_type = other DNA
cagtatataactttttttagg

SEQ ID NO: 7437 - DNA, 21 bp, Homo sapiens
  source 1..21: mol_type = other DNA
agtatataactttttttaggg

SEQ ID NO: 7438 - DNA, 21 bp, Homo sapiens
  source 1..21: mol_type = other DNA
gtatataactttttttagggg

SEQ ID NO: 7439 - DNA, 21 bp, Homo sapiens
  source 1..21: mol_type = other DNA
aactttttttaggggattttt

SEQ ID NO: 7440 - DNA, 21 bp, Homo sapiens
  source 1..21: mol_type = other DNA
actttttttaggggatttttt

SEQ ID NO: 7441 - DNA, 21 bp, Homo sapiens
  source 1..21: mol_type = other DNA
gggatttttttttagacagca

SEQ ID NO: 7442 - DNA, 21 bp, Homo sapiens
  source 1..21: mol_type = other DNA
ggatttttttttagacagcaa

SEQ ID NO: 7443 - DNA, 21 bp, Homo sapiens
  source 1..21: mol_type = other DNA
gatttttttttagacagcaaa

SEQ ID NO: 7444 - DNA, 21 bp, Homo sapiens
  source 1..21: mol_type = other DNA
tgaagatttccatttgtcaaa

SEQ ID NO: 7445 - DNA, 21 bp, Homo sapiens
  source 1..21: mol_type = other DNA
gaagatttccatttgtcaaaa

SEQ ID NO: 7446 - DNA, 21 bp, Homo sapiens
  source 1..21: mol_type = other DNA
aagatttccatttgtcaaaaa

SEQ ID NO: 7447 - DNA, 21 bp, Homo sapiens
  source 1..21: mol_type = other DNA
agatttccatttgtcaaaaag

SEQ ID NO: 7448 - DNA, 21 bp, Homo sapiens
  source 1..21: mol_type = other DNA
tccatttgtcaaaaagtaatg

SEQ ID NO: 7449 - DNA, 21 bp, Homo sapiens
  source 1..21: mol_type = other DNA
ccatttgtcaaaaagtaatga

SEQ ID NO: 7450 - DNA, 21 bp, Homo sapiens
  source 1..21: mol_type = other DNA
catttgtcaaaaagtaatgat

SEQ ID NO: 7451 - DNA, 21 bp, Homo sapiens
  source 1..21: mol_type = other DNA
gtcaaaaagtaatgatttctt

SEQ ID NO: 7452 - DNA, 21 bp, Homo sapiens
  source 1..21: mol_type = other DNA
tcaaaaagtaatgatttcttg

SEQ ID NO: 7453 - DNA, 21 bp, Homo sapiens
  source 1..21: mol_type = other DNA
caaaaagtaatgatttcttga

SEQ ID NO: 7454 - DNA, 21 bp, Homo sapiens
  source 1..21: mol_type = other DNA
aaaaagtaatgatttcttgat

SEQ ID NO: 7455 - DNA, 21 bp, Homo sapiens
  source 1..21: mol_type = other DNA
aaagtaatgatttcttgataa

SEQ ID NO: 7456 - DNA, 21 bp, Homo sapiens
  source 1..21: mol_type = other DNA
agtaatgatttcttgataatt

SEQ ID NO: 7457 - DNA, 21 bp, Homo sapiens
  source 1..21: mol_type = other DNA
gtaatgatttcttgataattg

SEQ ID NO: 7458 - DNA, 21 bp, Homo sapiens
  source 1..21: mol_type = other DNA
aatgatttcttgataattgtg

SEQ ID NO: 7459 - DNA, 21 bp, Homo sapiens
  source 1..21: mol_type = other DNA
atgatttcttgataattgtgt

SEQ ID NO: 7460 - DNA, 21 bp, Homo sapiens
  source 1..21: mol_type = other DNA
ttcttgataattgtgtagtaa

SEQ ID NO: 7461 - DNA, 21 bp, Homo sapiens
  source 1..21: mol_type = other DNA
tcttgataattgtgtagtaat

SEQ ID NO: 7462 - DNA, 21 bp, Homo sapiens
  source 1..21: mol_type = other DNA
cttgataattgtgtagtaatg

SEQ ID NO: 7463 - DNA, 21 bp, Homo sapiens
  source 1..21: mol_type = other DNA
tgataattgtgtagtaatgtt

SEQ ID NO: 7464 - DNA, 21 bp, Homo sapiens
  source 1..21: mol_type = other DNA
taattgtgtagtaatgttttt

SEQ ID NO: 7465 - DNA, 21 bp, Homo sapiens
  source 1..21: mol_type = other DNA
attgtgtagtaatgtttttta

SEQ ID NO: 7466 - DNA, 21 bp, Homo sapiens
  source 1..21: mol_type = other DNA
ttgtgtagtaatgttttttag

SEQ ID NO: 7467 - DNA, 21 bp, Homo sapiens
  source 1..21: mol_type = other DNA
ccttaaagctgaatttatatt

SEQ ID NO: 7468 - DNA, 21 bp, Homo sapiens
  source 1..21: mol_type = other DNA
ttaaagctgaatttatattta

SEQ ID NO: 7469 - DNA, 21 bp, Homo sapiens
  source 1..21: mol_type = other DNA
aatttatatttagtaacttct

SEQ ID NO: 7470 - DNA, 21 bp, Homo sapiens
  source 1..21: mol_type = other DNA
atttatatttagtaacttctg

SEQ ID NO: 7471 - DNA, 21 bp, Homo sapiens
  source 1..21: mol_type = other DNA
tttatatttagtaacttctgt

SEQ ID NO: 7472 - DNA, 21 bp, Homo sapiens
  source 1..21: mol_type = other DNA
atttagtaacttctgtgttaa

SEQ ID NO: 7473 - DNA, 21 bp, Homo sapiens
  source 1..21: mol_type = other DNA
actgaatagctgtcataaaat

SEQ ID NO: 7474 - DNA, 21 bp, Homo sapiens
  source 1..21: mol_type = other DNA
ctgaatagctgtcataaaatg

SEQ ID NO: 7475 - DNA, 21 bp, Homo sapiens
  source 1..21: mol_type = other DNA
taaaatgaaactttctttcta

SEQ ID NO: 7476 - DNA, 21 bp, Homo sapiens
  source 1..21: mol_type = other DNA
aaaatgaaactttctttctaa

SEQ ID NO: 7477 - DNA, 21 bp, Homo sapiens
  source 1..21: mol_type = other DNA
aaatgaaactttctttctaaa

SEQ ID NO: 7478 - DNA, 21 bp, Homo sapiens
  source 1..21: mol_type = other DNA
atgaaactttctttctaaaga

SEQ ID NO: 7479 - DNA, 21 bp, Homo sapiens
  source 1..21: mol_type = other DNA
aactttctttctaaagaaaga

SEQ ID NO: 7480 - DNA, 21 bp, Homo sapiens
  source 1..21: mol_type = other DNA
cacatgagttcttgaagaata

SEQ ID NO: 7481 - DNA, 21 bp, Homo sapiens
  source 1..21: mol_type = other DNA
tcttgaagaatagtcataact

SEQ ID NO: 7482 - DNA, 21 bp, Homo sapiens
  source 1..21: mol_type = other DNA
cttgaagaatagtcataacta

SEQ ID NO: 7483 - DNA, 21 bp, Homo sapiens
  source 1..21: mol_type = other DNA
ttgaagaatagtcataactag

SEQ ID NO: 7484 - DNA, 21 bp, Homo sapiens
  source 1..21: mol_type = other DNA
aagaatagtcataactagatt

SEQ ID NO: 7485 - DNA, 21 bp, Homo sapiens
  source 1..21: mol_type = other DNA
agaatagtcataactagatta

SEQ ID NO: 7486 - DNA, 21 bp, Homo sapiens
  source 1..21: mol_type = other DNA
gaatagtcataactagattaa

SEQ ID NO: 7487 - DNA, 21 bp, Homo sapiens
  source 1..21: mol_type = other DNA
aatagtcataactagattaag

SEQ ID NO: 7488 - DNA, 21 bp, Homo sapiens
  source 1..21: mol_type = other DNA
gtcataactagattaagatct

SEQ ID NO: 7489 - DNA, 21 bp, Homo sapiens
  source 1..21: mol_type = other DNA
actagattaagatctgtgttt

SEQ ID NO: 7490 - DNA, 21 bp, Homo sapiens
  source 1..21: mol_type = other DNA
tagattaagatctgtgtttta

SEQ ID NO: 7491 - DNA, 21 bp, Homo sapiens
  source 1..21: mol_type = other DNA
agattaagatctgtgttttag

SEQ ID NO: 7492 - DNA, 21 bp, Homo sapiens
  source 1..21: mol_type = other DNA
attaagatctgtgttttagtt

SEQ ID NO: 7493 - DNA, 21 bp, Homo sapiens
  source 1..21: mol_type = other DNA
tctgtgttttagtttaatagt

SEQ ID NO: 7494 - DNA, 21 bp, Homo sapiens
  source 1..21: mol_type = other DNA
ctgtgttttagtttaatagtt

SEQ ID NO: 7495 - DNA, 21 bp, Homo sapiens
  source 1..21: mol_type = other DNA
gtgttttagtttaatagtttg

SEQ ID NO: 7496 - DNA, 21 bp, Homo sapiens
  source 1..21: mol_type = other DNA
gttttagtttaatagtttgaa

SEQ ID NO: 7497 - DNA, 21 bp, Homo sapiens
  source 1..21: mol_type = other DNA
ttttagtttaatagtttgaag

SEQ ID NO: 7498 - DNA, 21 bp, Homo sapiens
  source 1..21: mol_type = other DNA
gtttgggataatgataggtaa

SEQ ID NO: 7499 - DNA, 21 bp, Homo sapiens
  source 1..21: mol_type = other DNA
ttgggataatgataggtaatt

SEQ ID NO: 7500 - DNA, 21 bp, Homo sapiens
  source 1..21: mol_type = other DNA
ggataatgataggtaatttag

SEQ ID NO: 7501 - DNA, 21 bp, Homo sapiens
  source 1..21: mol_type = other DNA
gataatgataggtaatttaga

SEQ ID NO: 7502 - DNA, 21 bp, Homo sapiens
  source 1..21: mol_type = other DNA
aatgataggtaatttagatga

SEQ ID NO: 7503 - DNA, 21 bp, Homo sapiens
  source 1..21: mol_type = other DNA
atgataggtaatttagatgaa

SEQ ID NO: 7504 - DNA, 21 bp, Homo sapiens
  source 1..21: mol_type = other DNA
aggtaatttagatgaatttag

SEQ ID NO: 7505 - DNA, 21 bp, Homo sapiens
  source 1..21: mol_type = other DNA
gtaatttagatgaatttaggg

SEQ ID NO: 7506 - DNA, 21 bp, Homo sapiens
  source 1..21: mol_type = other DNA
agatgaatttaggggaaaaaa

SEQ ID NO: 7507 - DNA, 21 bp, Homo sapiens
  source 1..21: mol_type = other DNA
gatgaatttaggggaaaaaaa

SEQ ID NO: 7508 - DNA, 21 bp, Homo sapiens
  source 1..21: mol_type = other DNA
gggaaaaaaaagttatctgca

SEQ ID NO: 7509 - DNA, 21 bp, Homo sapiens
  source 1..21: mol_type = other DNA
ggaaaaaaaagttatctgcag

SEQ ID NO: 7510 - DNA, 21 bp, Homo sapiens
  source 1..21: mol_type = other DNA
aaaaagttatctgcagatatg

SEQ ID NO: 7511 - DNA, 21 bp, Homo sapiens
  source 1..21: mol_type = other DNA
gtcttgtgttttcatgttgaa

SEQ ID NO: 7512 - DNA, 21 bp, Homo sapiens
  source 1..21: mol_type = other DNA
tcttgtgttttcatgttgaaa

SEQ ID NO: 7513 - DNA, 21 bp, Homo sapiens
  source 1..21: mol_type = other DNA
cttgtgttttcatgttgaaaa

SEQ ID NO: 7514 - DNA, 21 bp, Homo sapiens
  source 1..21: mol_type = other DNA
catgttgaaaatacttttgca

SEQ ID NO: 7515 - DNA, 21 bp, Homo sapiens
  source 1..21: mol_type = other DNA
atgttgaaaatacttttgcat

SEQ ID NO: 7516 - DNA, 21 bp, Homo sapiens
  source 1..21: mol_type = other DNA
tgttgaaaatacttttgcatt

SEQ ID NO: 7517 - DNA, 21 bp, Homo sapiens
  source 1..21: mol_type = other DNA
gttgaaaatacttttgcattt

SEQ ID NO: 7518 - DNA, 21 bp, Homo sapiens
  source 1..21: mol_type = other DNA
cttttgcatttttcctttgag

SEQ ID NO: 7519 - DNA, 21 bp, Homo sapiens
  source 1..21: mol_type = other DNA
tgagtgccaatttcttactag

SEQ ID NO: 7520 - DNA, 21 bp, Homo sapiens
  source 1..21: mol_type = other DNA
gccaatttcttactagtacta

SEQ ID NO: 7521 - DNA, 21 bp, Homo sapiens
  source 1..21: mol_type = other DNA
ccaatttcttactagtactat

SEQ ID NO: 7522 - DNA, 21 bp, Homo sapiens
  source 1..21: mol_type = other DNA
tactagtactatttcttaatg

SEQ ID NO: 7523 - DNA, 21 bp, Homo sapiens
  source 1..21: mol_type = other DNA
actagtactatttcttaatgt

SEQ ID NO: 7524 - DNA, 21 bp, Homo sapiens
  source 1..21: mol_type = other DNA
tactatttcttaatgtaacat

SEQ ID NO: 7525 - DNA, 21 bp, Homo sapiens
  source 1..21: mol_type = other DNA
actatttcttaatgtaacatg

SEQ ID NO: 7526 - DNA, 21 bp, Homo sapiens
  source 1..21: mol_type = other DNA
ctatttcttaatgtaacatgt

SEQ ID NO: 7527 - DNA, 21 bp, Homo sapiens
  source 1..21: mol_type = other DNA
ttaatgtaacatgtttacctg

SEQ ID NO: 7528 - DNA, 21 bp, Homo sapiens
  source 1..21: mol_type = other DNA
cctggaatgtattttaactat

SEQ ID NO: 7529 - DNA, 21 bp, Homo sapiens
  source 1..21: mol_type = other DNA
tggaatgtattttaactattt

SEQ ID NO: 7530 - DNA, 21 bp, Homo sapiens
  source 1..21: mol_type = other DNA
ggaatgtattttaactatttt

SEQ ID NO: 7531 - DNA, 21 bp, Homo sapiens
  source 1..21: mol_type = other DNA
gaatgtattttaactattttt

SEQ ID NO: 7532 - DNA, 21 bp, Homo sapiens
  source 1..21: mol_type = other DNA
aatgtattttaactatttttg

SEQ ID NO: 7533 - DNA, 21 bp, Homo sapiens
  source 1..21: mol_type = other DNA
tgtattttaactatttttgta

SEQ ID NO: 7534 - DNA, 21 bp, Homo sapiens
  source 1..21: mol_type = other DNA
tattttaactatttttgtata

SEQ ID NO: 7535 - DNA, 21 bp, Homo sapiens
  source 1..21: mol_type = other DNA
attttaactatttttgtatag

SEQ ID NO: 7536 - DNA, 21 bp, Homo sapiens
  source 1..21: mol_type = other DNA
ttttaactatttttgtatagt

SEQ ID NO: 7537 - DNA, 21 bp, Homo sapiens
  source 1..21: mol_type = other DNA
tatttttgtatagtgtaaact

SEQ ID NO: 7538 - DNA, 21 bp, Homo sapiens
  source 1..21: mol_type = other DNA
atttttgtatagtgtaaactg

SEQ ID NO: 7539 - DNA, 21 bp, Homo sapiens
  source 1..21: mol_type = other DNA
tttttgtatagtgtaaactga

SEQ ID NO: 7540 - DNA, 21 bp, Homo sapiens
  source 1..21: mol_type = other DNA
aactgaaacatgcacattttg

SEQ ID NO: 7541 - DNA, 21 bp, Homo sapiens
  source 1..21: mol_type = other DNA
aacatgcacattttgtacatt

SEQ ID NO: 7542 - DNA, 21 bp, Homo sapiens
  source 1..21: mol_type = other DNA
tccagttgttttccatcattt

SEQ ID NO: 7543 - DNA, 21 bp, Homo sapiens
  source 1..21: mol_type = other DNA
cagttgttttccatcatttgg

SEQ ID NO: 7544 - DNA, 21 bp, Homo sapiens
  source 1..21: mol_type = other DNA
atgttggtcatatcaaacatt

SEQ ID NO: 7545 - DNA, 21 bp, Homo sapiens
  source 1..21: mol_type = other DNA
tgttggtcatatcaaacatta

SEQ ID NO: 7546 - DNA, 21 bp, Homo sapiens
  source 1..21: mol_type = other DNA
gttggtcatatcaaacattaa

SEQ ID NO: 7547 - DNA, 21 bp, Homo sapiens
  source 1..21: mol_type = other DNA
gtcatatcaaacattaaaaat

SEQ ID NO: 7548 - DNA, 21 bp, Homo sapiens
  source 1..21: mol_type = other DNA
aaaatgaccactcttttaatt

SEQ ID NO: 7549 - DNA, 21 bp, Homo sapiens
  source 1..21: mol_type = other DNA
aaatgaccactcttttaattg

SEQ ID NO: 7550 - DNA, 21 bp, Homo sapiens
  source 1..21: mol_type = other DNA
ctcttttaattgaaattaact

SEQ ID NO: 7551 - DNA, 21 bp, Homo sapiens
  source 1..21: mol_type = other DNA
tcttttaattgaaattaactt

SEQ ID NO: 7552 - DNA, 21 bp, Homo sapiens
  source 1..21: mol_type = other DNA
ttttaattgaaattaactttt

SEQ ID NO: 7553 - DNA, 21 bp, Homo sapiens
  source 1..21: mol_type = other DNA
ttaattgaaattaacttttaa

SEQ ID NO: 7554 - DNA, 21 bp, Homo sapiens
  source 1..21: mol_type = other DNA
taattgaaattaacttttaaa

SEQ ID NO: 7555 - DNA, 21 bp, Homo sapiens
  source 1..21: mol_type = other DNA
aattgaaattaacttttaaat

SEQ ID NO: 7556 - DNA, 21 bp, Homo sapiens
  source 1..21: mol_type = other DNA
attgaaattaacttttaaatg

SEQ ID NO: 7557 - DNA, 21 bp, Homo sapiens
  source 1..21: mol_type = other DNA
ttgaaattaacttttaaatgt

SEQ ID NO: 7558 - DNA, 21 bp, Homo sapiens
  source 1..21: mol_type = other DNA
tgaaattaacttttaaatgtt

SEQ ID NO: 7559 - DNA, 21 bp, Homo sapiens
  source 1..21: mol_type = other DNA
aattaacttttaaatgtttat

SEQ ID NO: 7560 - DNA, 21 bp, Homo sapiens
  source 1..21: mol_type = other DNA
aacttttaaatgtttatagga

SEQ ID NO: 7561 - DNA, 21 bp, Homo sapiens
  source 1..21: mol_type = other DNA
tttaaatgtttataggagtat

SEQ ID NO: 7562 - DNA, 21 bp, Homo sapiens
  source 1..21: mol_type = other DNA
ttaaatgtttataggagtatg

SEQ ID NO: 7563 - DNA, 21 bp, Homo sapiens
  source 1..21: mol_type = other DNA
gctgtgaagtgatctaaaatt

SEQ ID NO: 7564 - DNA, 21 bp, Homo sapiens
  source 1..21: mol_type = other DNA
tgtgaagtgatctaaaatttg

SEQ ID NO: 7565 - DNA, 21 bp, Homo sapiens
  source 1..21: mol_type = other DNA
gtgaagtgatctaaaatttgt

SEQ ID NO: 7566 - DNA, 21 bp, Homo sapiens
  source 1..21: mol_type = other DNA
tgaagtgatctaaaatttgta

SEQ ID NO: 7567 - DNA, 21 bp, Homo sapiens
  source 1..21: mol_type = other DNA
gaagtgatctaaaatttgtaa

SEQ ID NO: 7568 - DNA, 21 bp, Homo sapiens
  source 1..21: mol_type = other DNA
aagtgatctaaaatttgtaat

SEQ ID NO: 7569 - DNA, 21 bp, Homo sapiens
  source 1..21: mol_type = other DNA
agtgatctaaaatttgtaata

SEQ ID NO: 7570 - DNA, 21 bp, Homo sapiens
  source 1..21: mol_type = other DNA
atctaaaatttgtaatatttt

SEQ ID NO: 7571 - DNA, 21 bp, Homo sapiens
  source 1..21: mol_type = other DNA
tctaaaatttgtaatattttt

SEQ ID NO: 7572 - DNA, 21 bp, Homo sapiens
  source 1..21: mol_type = other DNA
aaatttgtaatatttttgtca

SEQ ID NO: 7573 - DNA, 21 bp, Homo sapiens
  source 1..21: mol_type = other DNA
aatttgtaatatttttgtcat

SEQ ID NO: 7574 - DNA, 21 bp, Homo sapiens
  source 1..21: mol_type = other DNA
atttgtaatatttttgtcatg

SEQ ID NO: 7575 - DNA, 21 bp, Homo sapiens
  source 1..21: mol_type = other DNA
gtaatatttttgtcatgaact

SEQ ID NO: 7576 - DNA, 21 bp, Homo sapiens
  source 1..21: mol_type = other DNA
taatatttttgtcatgaactg

SEQ ID NO: 7577 - DNA, 21 bp, Homo sapiens
  source 1..21: mol_type = other DNA
aactgtactactcctaattat

SEQ ID NO: 7578 - DNA, 21 bp, Homo sapiens
  source 1..21: mol_type = other DNA
actgtactactcctaattatt

SEQ ID NO: 7579 - DNA, 21 bp, Homo sapiens
  source 1..21: mol_type = other DNA
tcctaattattgtaatgtaat

SEQ ID NO: 7580 - DNA, 21 bp, Homo sapiens
  source 1..21: mol_type = other DNA
cctaattattgtaatgtaata

SEQ ID NO: 7581 - DNA, 21 bp, Homo sapiens
  source 1..21: mol_type = other DNA
taattattgtaatgtaataaa

SEQ ID NO: 7582 - DNA, 21 bp, Homo sapiens
  source 1..21: mol_type = other DNA
attattgtaatgtaataaaaa

SEQ ID NO: 7583 - DNA, 21 bp, Homo sapiens
  source 1..21: mol_type = other DNA
ttattgtaatgtaataaaaat

SEQ ID NO: 7584 - DNA, 21 bp, Homo sapiens
  source 1..21: mol_type = other DNA
attgtaatgtaataaaaatag

SEQ ID NO: 7585 - DNA, 21 bp, Homo sapiens
  source 1..21: mol_type = other DNA
ttgtaatgtaataaaaatagt

SEQ ID NO: 7586 - DNA, 21 bp, Homo sapiens
  source 1..21: mol_type = other DNA
aatgtaataaaaatagttaca

SEQ ID NO: 7587 - DNA, 21 bp, Homo sapiens
  source 1..21: mol_type = other DNA
atgtaataaaaatagttacag

SEQ ID NO: 7588 - DNA, 21 bp, Homo sapiens
  source 1..21: mol_type = other DNA
tgtaataaaaatagttacagt

SEQ ID NO: 7589 - DNA, 21 bp, Homo sapiens
  source 1..21: mol_type = other DNA
aaatagttacagtgacaaaaa

SEQ ID NO: 7590 - DNA, 21 bp, Homo sapiens
  source 1..21: mol_type = other DNA
aatagttacagtgacaaaaaa

SEQ ID NO: 7591 - DNA, 21 bp, Homo sapiens
  source 1..21: mol_type = other DNA
tagttacagtgacaaaaaaaa

SEQ ID NO: 7592 - DNA, 21 bp, Homo sapiens
  source 1..21: mol_type = other DNA
cctgctgaaaatgactgaata

SEQ ID NO: 7593 - DNA, 21 bp, Homo sapiens
  source 1..21: mol_type = other DNA
gaaaatgactgaatataaact

SEQ ID NO: 7594 - DNA, 21 bp, Homo sapiens
  source 1..21: mol_type = other DNA
atgactgaatataaacttgtg

SEQ ID NO: 7595 - DNA, 21 bp, Homo sapiens
  source 1..21: mol_type = other DNA
acagctaattcagaatcattt

SEQ ID NO: 7596 - DNA, 21 bp, Homo sapiens
  source 1..21: mol_type = other DNA
ggacgaatatgatccaacaat

SEQ ID NO: 7597 - DNA, 21 bp, Homo sapiens
  source 1..21: mol_type = other DNA
gaagcaagtagtaattgatgg

SEQ ID NO: 7598 - DNA, 21 bp, Homo sapiens
  source 1..21: mol_type = other DNA
ggggagggctttctttgtgta

SEQ ID NO: 7599 - DNA, 21 bp, Homo sapiens
  source 1..21: mol_type = other DNA
tttctttgtgtatttgccata

SEQ ID NO: 7600 - DNA, 21 bp, Homo sapiens
  source 1..21: mol_type = other DNA
ttctttgtgtatttgccataa

SEQ ID NO: 7601 - DNA, 21 bp, Homo sapiens
  source 1..21: mol_type = other DNA
tctttgtgtatttgccataaa

SEQ ID NO: 7602 - DNA, 21 bp, Homo sapiens
  source 1..21: mol_type = other DNA
ctttgtgtatttgccataaat

SEQ ID NO: 7603 - DNA, 21 bp, Homo sapiens
  source 1..21: mol_type = other DNA
gtgtatttgccataaataata

SEQ ID NO: 7604 - DNA, 21 bp, Homo sapiens
  source 1..21: mol_type = other DNA
tgtatttgccataaataatac

SEQ ID NO: 7605 - DNA, 21 bp, Homo sapiens
  source 1..21: mol_type = other DNA
tgccataaataatactaaatc

SEQ ID NO: 7606 - DNA, 21 bp, Homo sapiens
  source 1..21: mol_type = other DNA
gccataaataatactaaatca

SEQ ID NO: 7607 - DNA, 21 bp, Homo sapiens
  source 1..21: mol_type = other DNA
cataaataatactaaatcatt

SEQ ID NO: 7608 - DNA, 21 bp, Homo sapiens
  source 1..21: mol_type = other DNA
ataaataatactaaatcattt

SEQ ID NO: 7609 - DNA, 21 bp, Homo sapiens
  source 1..21: mol_type = other DNA
taaataatactaaatcatttg

SEQ ID NO: 7610 - DNA, 21 bp, Homo sapiens
  source 1..21: mol_type = other DNA
aaataatactaaatcatttga

SEQ ID NO: 7611 - DNA, 21 bp, Homo sapiens
  source 1..21: mol_type = other DNA
tcatttgaagatattcaccat

SEQ ID NO: 7612 - DNA, 21 bp, Homo sapiens
  source 1..21: mol_type = other DNA
atttgaagatattcaccatta

SEQ ID NO: 7613 - DNA, 21 bp, Homo sapiens
  source 1..21: mol_type = other DNA
tttgaagatattcaccattat

SEQ ID NO: 7614 - DNA, 21 bp, Homo sapiens
  source 1..21: mol_type = other DNA
ttgaagatattcaccattata

SEQ ID NO: 7615 - DNA, 21 bp, Homo sapiens
  source 1..21: mol_type = other DNA
tgaagatattcaccattatag

SEQ ID NO: 7616 - DNA, 21 bp, Homo sapiens
  source 1..21: mol_type = other DNA
caccattatagagaacaaatt

SEQ ID NO: 7617 - DNA, 21 bp, Homo sapiens
  source 1..21: mol_type = other DNA
ccattatagagaacaaattaa

SEQ ID NO: 7618 - DNA, 21 bp, Homo sapiens
  source 1..21: mol_type = other DNA
cattatagagaacaaattaaa

SEQ ID NO: 7619 - DNA, 21 bp, Homo sapiens
  source 1..21: mol_type = other DNA
attatagagaacaaattaaaa

SEQ ID NO: 7620 - DNA, 21 bp, Homo sapiens
  source 1..21: mol_type = other DNA
ttatagagaacaaattaaaag

SEQ ID NO: 7621 - DNA, 21 bp, Homo sapiens
  source 1..21: mol_type = other DNA
tcctagtaggaaataaatgtg

SEQ ID NO: 7622 - DNA, 21 bp, Homo sapiens
  source 1..21: mol_type = other DNA
cctagtaggaaataaatgtga

SEQ ID NO: 7623 - DNA, 21 bp, Homo sapiens
  source 1..21: mol_type = other DNA
gcaagaagttatggaattcct

SEQ ID NO: 7624 - DNA, 21 bp, Homo sapiens
  source 1..21: mol_type = other DNA
agaagttatggaattcctttt

SEQ ID NO: 7625 - DNA, 21 bp, Homo sapiens
  source 1..21: mol_type = other DNA
gaagttatggaattcctttta

SEQ ID NO: 7626 - DNA, 21 bp, Homo sapiens
  source 1..21: mol_type = other DNA
aagttatggaattccttttat

SEQ ID NO: 7627 - DNA, 21 bp, Homo sapiens
  source 1..21: mol_type = other DNA
agttatggaattccttttatt

SEQ ID NO: 7628 - DNA, 21 bp, Homo sapiens
  source 1..21: mol_type = other DNA
agtggaggatgctttttatac

SEQ ID NO: 7629 - DNA, 21 bp, Homo sapiens
  source 1..21: mol_type = other DNA
tggaggatgctttttatacat

SEQ ID NO: 7630 - DNA, 21 bp, Homo sapiens
  source 1..21: mol_type = other DNA
atacagattgaaaaaaatcag

SEQ ID NO: 7631 - DNA, 21 bp, Homo sapiens
  source 1..21: mol_type = other DNA
tacagattgaaaaaaatcagc

SEQ ID NO: 7632 - DNA, 21 bp, Homo sapiens
  source 1..21: mol_type = other DNA
cagattgaaaaaaatcagcaa

SEQ ID NO: 7633 - DNA, 21 bp, Homo sapiens
  source 1..21: mol_type = other DNA
agattgaaaaaaatcagcaaa

SEQ ID NO: 7634 - DNA, 21 bp, Homo sapiens
  source 1..21: mol_type = other DNA
gattgaaaaaaatcagcaaag

SEQ ID NO: 7635 - DNA, 21 bp, Homo sapiens
  source 1..21: mol_type = other DNA
attgaaaaaaatcagcaaaga

SEQ ID NO: 7636 - DNA, 21 bp, Homo sapiens
  source 1..21: mol_type = other DNA
actcctggctgtgtgaaaatt

SEQ ID NO: 7637 - DNA, 21 bp, Homo sapiens
  source 1..21: mol_type = other DNA
ctggctgtgtgaaaattaaaa

SEQ ID NO: 7638 - DNA, 21 bp, Homo sapiens
  source 1..21: mol_type = other DNA
ctgtgtgaaaattaaaaaatg

SEQ ID NO: 7639 - DNA, 21 bp, Homo sapiens
  source 1..21: mol_type = other DNA
tgtgtgaaaattaaaaaatgc

SEQ ID NO: 7640 - DNA, 21 bp, Homo sapiens
  source 1..21: mol_type = other DNA
gtgtgaaaattaaaaaatgca

SEQ ID NO: 7641 - DNA, 21 bp, Homo sapiens
  source 1..21: mol_type = other DNA
tgtgaaaattaaaaaatgcat

SEQ ID NO: 7642 - DNA, 21 bp, Homo sapiens
  source 1..21: mol_type = other DNA
tgaaaattaaaaaatgcatta

SEQ ID NO: 7643 - DNA, 21 bp, Homo sapiens
  source 1..21: mol_type = other DNA
gaaaattaaaaaatgcattat

SEQ ID NO: 7644 - DNA, 21 bp, Homo sapiens
  source 1..21: mol_type = other DNA
aaaattaaaaaatgcattata

SEQ ID NO: 7645 - DNA, 21 bp, Homo sapiens
  source 1..21: mol_type = other DNA
aaattaaaaaatgcattataa

SEQ ID NO: 7646 - DNA, 21 bp, Homo sapiens
  source 1..21: mol_type = other DNA
attaaaaaatgcattataatg

SEQ ID NO: 7647 - DNA, 21 bp, Homo sapiens
  source 1..21: mol_type = other DNA
aatgcattataatgtaatctg

SEQ ID NO: 7648 - DNA, 21 bp, Homo sapiens
  source 1..21: mol_type = other DNA
agttcgagaaattcgaaaaca

SEQ ID NO: 7649 - DNA, 21 bp, Homo sapiens
  source 1..21: mol_type = other DNA
gttcgagaaattcgaaaacat

SEQ ID NO: 7650 - DNA, 21 bp, Homo sapiens
  source 1..21: mol_type = other DNA
ttcgagaaattcgaaaacata

SEQ ID NO: 7651 - DNA, 21 bp, Homo sapiens
  source 1..21: mol_type = other DNA
gagaaattcgaaaacataaag

SEQ ID NO: 7652 - DNA, 21 bp, Homo sapiens
  source 1..21: mol_type = other DNA
attcgaaaacataaagaaaag

SEQ ID NO: 7653 - DNA, 21 bp, Homo sapiens
  source 1..21: mol_type = other DNA
ttcgaaaacataaagaaaaga

SEQ ID NO: 7654 - DNA, 21 bp, Homo sapiens
  source 1..21: mol_type = other DNA
gcaaagatggtaaaaagaaga

SEQ ID NO: 7655 - DNA, 21 bp, Homo sapiens
  source 1..21: mol_type = other DNA
caaagatggtaaaaagaagaa

SEQ ID NO: 7656 - DNA, 21 bp, Homo sapiens
  source 1..21: mol_type = other DNA
aagatggtaaaaagaagaaaa

SEQ ID NO: 7657 - DNA, 21 bp, Homo sapiens
  source 1..21: mol_type = other DNA
agatggtaaaaagaagaaaaa

SEQ ID NO: 7658 - DNA, 21 bp, Homo sapiens
  source 1..21: mol_type = other DNA
gtaaaaagaagaaaaagaagt

SEQ ID NO: 7659 - DNA, 21 bp, Homo sapiens
  source 1..21: mol_type = other DNA
taaaaagaagaaaaagaagtc

SEQ ID NO: 7660 - DNA, 21 bp, Homo sapiens
  source 1..21: mol_type = other DNA
aaaaagaagaaaaagaagtca

SEQ ID NO: 7661 - DNA, 21 bp, Homo sapiens
  source 1..21: mol_type = other DNA
agtcaaagacaaagtgtgtaa

SEQ ID NO: 7662 - DNA, 21 bp, Homo sapiens
  source 1..21: mol_type = other DNA
gtcaaagacaaagtgtgtaat

SEQ ID NO: 7663 - DNA, 21 bp, Homo sapiens
  source 1..21: mol_type = other DNA
aagacaaagtgtgtaattatg

SEQ ID NO: 7664 - DNA, 21 bp, Homo sapiens
  source 1..21: mol_type = other DNA
gacaaagtgtgtaattatgta

SEQ ID NO: 7665 - DNA, 21 bp, Homo sapiens
  source 1..21: mol_type = other DNA
aagtgtgtaattatgtaaata

SEQ ID NO: 7666 - DNA, 21 bp, Homo sapiens
  source 1..21: mol_type = other DNA
gtgtgtaattatgtaaataca

SEQ ID NO: 7667 - DNA, 21 bp, Homo sapiens
  source 1..21: mol_type = other DNA
gtgtaattatgtaaatacaat

SEQ ID NO: 7668 - DNA, 21 bp, Homo sapiens
  source 1..21: mol_type = other DNA
tgtaattatgtaaatacaatt

SEQ ID NO: 7669 - DNA, 21 bp, Homo sapiens
  source 1..21: mol_type = other DNA
attatgtaaatacaatttgta

SEQ ID NO: 7670 - DNA, 21 bp, Homo sapiens
  source 1..21: mol_type = other DNA
ttatgtaaatacaatttgtac

SEQ ID NO: 7671 - DNA, 21 bp, Homo sapiens
  source 1..21: mol_type = other DNA
tatgtaaatacaatttgtact

SEQ ID NO: 7672 - DNA, 21 bp, Homo sapiens
  source 1..21: mol_type = other DNA
atgtaaatacaatttgtactt

SEQ ID NO: 7673 - DNA, 21 bp, Homo sapiens
  source 1..21: mol_type = other DNA
atacaatttgtacttttttct

SEQ ID NO: 7674 - DNA, 21 bp, Homo sapiens
  source 1..21: mol_type = other DNA
tacaatttgtacttttttctt

SEQ ID NO: 7675 - DNA, 21 bp, Homo sapiens
  source 1..21: mol_type = other DNA
catactagtacaagtggtaat

SEQ ID NO: 7676 - DNA, 21 bp, Homo sapiens
  source 1..21: mol_type = other DNA
atactagtacaagtggtaatt

SEQ ID NO: 7677 - DNA, 21 bp, Homo sapiens
  source 1..21: mol_type = other DNA
gtacaagtggtaatttttgta

SEQ ID NO: 7678 - DNA, 21 bp, Homo sapiens
  source 1..21: mol_type = other DNA
tacaagtggtaatttttgtac

SEQ ID NO: 7679 - DNA, 21 bp, Homo sapiens
  source 1..21: mol_type = other DNA
ggtaatttttgtacattacac

SEQ ID NO: 7680 - DNA, 21 bp, Homo sapiens
  source 1..21: mol_type = other DNA
gtaatttttgtacattacact

SEQ ID NO: 7681 - DNA, 21 bp, Homo sapiens
  source 1..21: mol_type = other DNA
taatttttgtacattacacta

SEQ ID NO: 7682 - DNA, 21 bp, Homo sapiens
  source 1..21: mol_type = other DNA
aatttttgtacattacactaa

SEQ ID NO: 7683 - DNA, 21 bp, Homo sapiens
  source 1..21: mol_type = other DNA
atttttgtacattacactaaa

SEQ ID NO: 7684 - DNA, 21 bp, Homo sapiens
  source 1..21: mol_type = other DNA
tacactaaattattagcattt

SEQ ID NO: 7685 - DNA, 21 bp, Homo sapiens
  source 1..21: mol_type = other DNA
cactaaattattagcatttgt

SEQ ID NO: 7686 - DNA, 21 bp, Homo sapiens
  source 1..21: mol_type = other DNA
actaaattattagcatttgtt

SEQ ID NO: 7687 - DNA, 21 bp, Homo sapiens
  source 1..21: mol_type = other DNA
attattagcatttgttttagc

SEQ ID NO: 7688 - DNA, 21 bp, Homo sapiens
  source 1..21: mol_type = other DNA
agcatttgttttagcattacc

SEQ ID NO: 7689 - DNA, 21 bp, Homo sapiens
  source 1..21: mol_type = other DNA
gcatttgttttagcattacct

SEQ ID NO: 7690 - DNA, 21 bp, Homo sapiens
  source 1..21: mol_type = other DNA
atttgttttagcattacctaa

SEQ ID NO: 7691 - DNA, 21 bp, Homo sapiens
  source 1..21: mol_type = other DNA
tttgttttagcattacctaat

SEQ ID NO: 7692 - DNA, 21 bp, Homo sapiens
  source 1..21: mol_type = other DNA
ttgttttagcattacctaatt

SEQ ID NO: 7693 - DNA, 21 bp, Homo sapiens
  source 1..21: mol_type = other DNA
tgttttagcattacctaattt

SEQ ID NO: 7694 - DNA, 21 bp, Homo sapiens
  source 1..21: mol_type = other DNA
cagactgttagcttttacctt

SEQ ID NO: 7695 - DNA, 21 bp, Homo sapiens
  source 1..21: mol_type = other DNA
agactgttagcttttacctta

SEQ ID NO: 7696 - DNA, 21 bp, Homo sapiens
  source 1..21: mol_type = other DNA
ttagcttttaccttaaatgct

SEQ ID NO: 7697 - DNA, 21 bp, Homo sapiens
  source 1..21: mol_type = other DNA
tagcttttaccttaaatgctt

SEQ ID NO: 7698 - DNA, 21 bp, Homo sapiens
  source 1..21: mol_type = other DNA
agcttttaccttaaatgctta

SEQ ID NO: 7699 - DNA, 21 bp, Homo sapiens
  source 1..21: mol_type = other DNA
taccttaaatgcttattttaa

SEQ ID NO: 7700 - DNA, 21 bp, Homo sapiens
  source 1..21: mol_type = other DNA
accttaaatgcttattttaaa

SEQ ID NO: 7701 - DNA, 21 bp, Homo sapiens
  source 1..21: mol_type = other DNA
aatgcttattttaaaatgaca

SEQ ID NO: 7702 - DNA, 21 bp, Homo sapiens
  source 1..21: mol_type = other DNA
tgcttattttaaaatgacagt

SEQ ID NO: 7703 - DNA, 21 bp, Homo sapiens
  source 1..21: mol_type = other DNA
cagtggaagtttttttttcct

SEQ ID NO: 7704 - DNA, 21 bp, Homo sapiens
  source 1..21: mol_type = other DNA
gtggaagtttttttttcctct

SEQ ID NO: 7705 - DNA, 21 bp, Homo sapiens
  source 1..21: mol_type = other DNA
tggaagtttttttttcctcta

SEQ ID NO: 7706 - DNA, 21 bp, Homo sapiens
  source 1..21: mol_type = other DNA
agttttggtttttgaactagc

SEQ ID NO: 7707 - DNA, 21 bp, Homo sapiens
  source 1..21: mol_type = other DNA
atgcctgtgaaaaagaaactg

SEQ ID NO: 7708 - DNA, 21 bp, Homo sapiens
  source 1..21: mol_type = other DNA
tgaaaaagaaactgaatacct

SEQ ID NO: 7709 - DNA, 21 bp, Homo sapiens
  source 1..21: mol_type = other DNA
gaaaaagaaactgaataccta

SEQ ID NO: 7710 - DNA, 21 bp, Homo sapiens
  source 1..21: mol_type = other DNA
gaaactgaatacctaagattt

SEQ ID NO: 7711 - DNA, 21 bp, Homo sapiens
  source 1..21: mol_type = other DNA
catgcagttgattacttctta

SEQ ID NO: 7712 - DNA, 21 bp, Homo sapiens
  source 1..21: mol_type = other DNA
atgcagttgattacttcttat

SEQ ID NO: 7713 - DNA, 21 bp, Homo sapiens
  source 1..21: mol_type = other DNA
agttgattacttcttattttt

SEQ ID NO: 7714 - DNA, 21 bp, Homo sapiens
  source 1..21: mol_type = other DNA
acttcttatttttcttaccaa

SEQ ID NO: 7715 - DNA, 21 bp, Homo sapiens
  source 1..21: mol_type = other DNA
cttcttatttttcttaccaat

SEQ ID NO: 7716 - DNA, 21 bp, Homo sapiens
  source 1..21: mol_type = other DNA
ttcttatttttcttaccaatt

SEQ ID NO: 7717 - DNA, 21 bp, Homo sapiens
  source 1..21: mol_type = other DNA
gaatgttggtgtgaaacaaat

SEQ ID NO: 7718 - DNA, 21 bp, Homo sapiens
  source 1..21: mol_type = other DNA
tgttggtgtgaaacaaattaa

SEQ ID NO: 7719 - DNA, 21 bp, Homo sapiens
  source 1..21: mol_type = other DNA
gttggtgtgaaacaaattaat

SEQ ID NO: 7720 - DNA, 21 bp, Homo sapiens
  source 1..21: mol_type = other DNA
gaaacaaattaatgaagcttt

SEQ ID NO: 7721 - DNA, 21 bp, Homo sapiens
  source 1..21: mol_type = other DNA
aaacaaattaatgaagctttt

SEQ ID NO: 7722 - DNA, 21 bp, Homo sapiens
  source 1..21: mol_type = other DNA
attctgtgttttatctagtca

SEQ ID NO: 7723 - DNA, 21 bp, Homo sapiens
  source 1..21: mol_type = other DNA
ttctgtgttttatctagtcac

SEQ ID NO: 7724 - DNA, 21 bp, Homo sapiens
  source 1..21: mol_type = other DNA
tgtgttttatctagtcacata

SEQ ID NO: 7725 - DNA, 21 bp, Homo sapiens
  source 1..21: mol_type = other DNA
gtgttttatctagtcacataa

SEQ ID NO: 7726 - DNA, 21 bp, Homo sapiens
  source 1..21: mol_type = other DNA
ttatctagtcacataaatgga

SEQ ID NO: 7727 - DNA, 21 bp, Homo sapiens
  source 1..21: mol_type = other DNA
tatctagtcacataaatggat

SEQ ID NO: 7728 - DNA, 21 bp, Homo sapiens
  source 1..21: mol_type = other DNA
cacataaatggattaattact

SEQ ID NO: 7729 - DNA, 21 bp, Homo sapiens
  source 1..21: mol_type = other DNA
acataaatggattaattacta

SEQ ID NO: 7730 - DNA, 21 bp, Homo sapiens
  source 1..21: mol_type = other DNA
aatggattaattactaatttc

SEQ ID NO: 7731 - DNA, 21 bp, Homo sapiens
  source 1..21: mol_type = other DNA
tggattaattactaatttcag

SEQ ID NO: 7732 - DNA, 21 bp, Homo sapiens
  source 1..21: mol_type = other DNA
ggattaattactaatttcagt

SEQ ID NO: 7733 - DNA, 21 bp, Homo sapiens
  source 1..21: mol_type = other DNA
gattaattactaatttcagtt

SEQ ID NO: 7734 - DNA, 21 bp, Homo sapiens
  source 1..21: mol_type = other DNA
tctaattggtttttactgaaa

SEQ ID NO: 7735 - DNA, 21 bp, Homo sapiens
  source 1..21: mol_type = other DNA
attggtttttactgaaacatt

SEQ ID NO: 7736 - DNA, 21 bp, Homo sapiens
  source 1..21: mol_type = other DNA
ttggtttttactgaaacattg

SEQ ID NO: 7737 - DNA, 21 bp, Homo sapiens
  source 1..21: mol_type = other DNA
acattgagggaacacaaattt

SEQ ID NO: 7738 - DNA, 21 bp, Homo sapiens
  source 1..21: mol_type = other DNA
cattgagggaacacaaattta

SEQ ID NO: 7739 - DNA, 21 bp, Homo sapiens
  source 1..21: mol_type = other DNA
cctgatgaatgtaaagttaca

SEQ ID NO: 7740 - DNA, 21 bp, Homo sapiens
  source 1..21: mol_type = other DNA
ctgatgaatgtaaagttacac

SEQ ID NO: 7741 - DNA, 21 bp, Homo sapiens
  source 1..21: mol_type = other DNA
ccccaaaatattatatttttt

SEQ ID NO: 7742 - DNA, 21 bp, Homo sapiens
  source 1..21: mol_type = other DNA
cccaaaatattatattttttc

SEQ ID NO: 7743 - DNA, 21 bp, Homo sapiens
  source 1..21: mol_type = other DNA
ccaaaatattatattttttct

SEQ ID NO: 7744 - DNA, 21 bp, Homo sapiens
  source 1..21: mol_type = other DNA
caaaatattatattttttcta

SEQ ID NO: 7745 - DNA, 21 bp, Homo sapiens
  source 1..21: mol_type = other DNA
aaatattatattttttctata

SEQ ID NO: 7746 - DNA, 21 bp, Homo sapiens
  source 1..21: mol_type = other DNA
aatattatattttttctataa

SEQ ID NO: 7747 - DNA, 21 bp, Homo sapiens
  source 1..21: mol_type = other DNA
atattatattttttctataaa

SEQ ID NO: 7748 - DNA, 21 bp, Homo sapiens
  source 1..21: mol_type = other DNA
tattatattttttctataaaa

SEQ ID NO: 7749 - DNA, 21 bp, Homo sapiens
  source 1..21: mol_type = other DNA
attatattttttctataaaaa

SEQ ID NO: 7750 - DNA, 21 bp, Homo sapiens
  source 1..21: mol_type = other DNA
ttatattttttctataaaaag

SEQ ID NO: 7751 - DNA, 21 bp, Homo sapiens
  source 1..21: mol_type = other DNA
tatattttttctataaaaaga

SEQ ID NO: 7752 - DNA, 21 bp, Homo sapiens
  source 1..21: mol_type = other DNA
atattttttctataaaaagaa

SEQ ID NO: 7753 - DNA, 21 bp, Homo sapiens
  source 1..21: mol_type = other DNA
ttttctataaaaagaaaaaaa

SEQ ID NO: 7754 - DNA, 21 bp, Homo sapiens
  source 1..21: mol_type = other DNA
tttctataaaaagaaaaaaat

SEQ ID NO: 7755 - DNA, 21 bp, Homo sapiens
  source 1..21: mol_type = other DNA
tctataaaaagaaaaaaatgg

SEQ ID NO: 7756 - DNA, 21 bp, Homo sapiens
  source 1..21: mol_type = other DNA
ctataaaaagaaaaaaatgga

SEQ ID NO: 7757 - DNA, 21 bp, Homo sapiens
  source 1..21: mol_type = other DNA
tataaaaagaaaaaaatggaa

SEQ ID NO: 7758 - DNA, 21 bp, Homo sapiens
  source 1..21: mol_type = other DNA
ataaaaagaaaaaaatggaaa

SEQ ID NO: 7759 - DNA, 21 bp, Homo sapiens
  source 1..21: mol_type = other DNA
taaaaagaaaaaaatggaaaa

SEQ ID NO: 7760 - DNA, 21 bp, Homo sapiens
  source 1..21: mol_type = other DNA
aaaaagaaaaaaatggaaaaa

SEQ ID NO: 7761 - DNA, 21 bp, Homo sapiens
  source 1..21: mol_type = other DNA
aaaagaaaaaaatggaaaaaa

SEQ ID NO: 7762 - DNA, 21 bp, Homo sapiens
  source 1..21: mol_type = other DNA
gaaaaaaatggaaaaaaatta

SEQ ID NO: 7763 - DNA, 21 bp, Homo sapiens
  source 1..21: mol_type = other DNA
aaaaaaatggaaaaaaattac

SEQ ID NO: 7764 - DNA, 21 bp, Homo sapiens
  source 1..21: mol_type = other DNA
aatggaaaaaaattacaaggc

SEQ ID NO: 7765 - DNA, 21 bp, Homo sapiens
  source 1..21: mol_type = other DNA
atggaaaaaaattacaaggca

SEQ ID NO: 7766 - DNA, 21 bp, Homo sapiens
  source 1..21: mol_type = other DNA
tggaaaaaaattacaaggcaa

SEQ ID NO: 7767 - DNA, 21 bp, Homo sapiens
  source 1..21: mol_type = other DNA
aggccatttccttttcacatt

SEQ ID NO: 7768 - DNA, 21 bp, Homo sapiens
  source 1..21: mol_type = other DNA
tttccttttcacattagataa

SEQ ID NO: 7769 - DNA, 21 bp, Homo sapiens
  source 1..21: mol_type = other DNA
ttcacattagataaattacta

SEQ ID NO: 7770 - DNA, 21 bp, Homo sapiens
  source 1..21: mol_type = other DNA
tcacattagataaattactat

SEQ ID NO: 7771 - DNA, 21 bp, Homo sapiens
  source 1..21: mol_type = other DNA
cacattagataaattactata

SEQ ID NO: 7772 - DNA, 21 bp, Homo sapiens
  source 1..21: mol_type = other DNA
ccagtatgaaatggggattat

SEQ ID NO: 7773 - DNA, 21 bp, Homo sapiens
  source 1..21: mol_type = other DNA
aatggggattattatagcaac

SEQ ID NO: 7774 - DNA, 21 bp, Homo sapiens
  source 1..21: mol_type = other DNA
ggggctatatttacatgctac

SEQ ID NO: 7775 - DNA, 21 bp, Homo sapiens
  source 1..21: mol_type = other DNA
gggctatatttacatgctact

SEQ ID NO: 7776 - DNA, 21 bp, Homo sapiens
  source 1..21: mol_type = other DNA
ggctatatttacatgctacta

SEQ ID NO: 7777 - DNA, 21 bp, Homo sapiens
  source 1..21: mol_type = other DNA
gctatatttacatgctactaa

SEQ ID NO: 7778 - DNA, 21 bp, Homo sapiens
  source 1..21: mol_type = other DNA
ctatatttacatgctactaaa

SEQ ID NO: 7779 - DNA, 21 bp, Homo sapiens
  source 1..21: mol_type = other DNA
tttacatgctactaaattttt

SEQ ID NO: 7780 - DNA, 21 bp, Homo sapiens
  source 1..21: mol_type = other DNA
gctactaaatttttataataa

SEQ ID NO: 7781 - DNA, 21 bp, Homo sapiens
  source 1..21: mol_type = other DNA
ctactaaatttttataataat

SEQ ID NO: 7782 - DNA, 21 bp, Homo sapiens
  source 1..21: mol_type = other DNA
actaaatttttataataattg

SEQ ID NO: 7783 - DNA, 21 bp, Homo sapiens
  source 1..21: mol_type = other DNA
ctaaatttttataataattga

SEQ ID NO: 7784 - DNA, 21 bp, Homo sapiens
  source 1..21: mol_type = other DNA
taaatttttataataattgaa

SEQ ID NO: 7785 - DNA, 21 bp, Homo sapiens
  source 1..21: mol_type = other DNA
aaatttttataataattgaaa

SEQ ID NO: 7786 - DNA, 21 bp, Homo sapiens
  source 1..21: mol_type = other DNA
aatttttataataattgaaaa

SEQ ID NO: 7787 - DNA, 21 bp, Homo sapiens
  source 1..21: mol_type = other DNA
atttttataataattgaaaag

SEQ ID NO: 7788 - DNA, 21 bp, Homo sapiens
  source 1..21: mol_type = other DNA
tttttataataattgaaaaga

SEQ ID NO: 7789 - DNA, 21 bp, Homo sapiens
  source 1..21: mol_type = other DNA
ttttataataattgaaaagat

SEQ ID NO: 7790 - DNA, 21 bp, Homo sapiens
  source 1..21: mol_type = other DNA
tttataataattgaaaagatt

SEQ ID NO: 7791 - DNA, 21 bp, Homo sapiens
  source 1..21: mol_type = other DNA
taataattgaaaagattttaa

SEQ ID NO: 7792 - DNA, 21 bp, Homo sapiens
  source 1..21: mol_type = other DNA
aataattgaaaagattttaac

SEQ ID NO: 7793 - DNA, 21 bp, Homo sapiens
  source 1..21: mol_type = other DNA
taattgaaaagattttaacaa

SEQ ID NO: 7794 - DNA, 21 bp, Homo sapiens
  source 1..21: mol_type = other DNA
aattgaaaagattttaacaag

SEQ ID NO: 7795 - DNA, 21 bp, Homo sapiens
  source 1..21: mol_type = other DNA
attgaaaagattttaacaagt

SEQ ID NO: 7796 - DNA, 21 bp, Homo sapiens
  source 1..21: mol_type = other DNA
ttgaaaagattttaacaagta

SEQ ID NO: 7797 - DNA, 21 bp, Homo sapiens
  source 1..21: mol_type = other DNA
tgaaaagattttaacaagtat

SEQ ID NO: 7798 - DNA, 21 bp, Homo sapiens
  source 1..21: mol_type = other DNA
gaaaagattttaacaagtata

SEQ ID NO: 7799 - DNA, 21 bp, Homo sapiens
  source 1..21: mol_type = other DNA
aaaagattttaacaagtataa

SEQ ID NO: 7800 - DNA, 21 bp, Homo sapiens
  source 1..21: mol_type = other DNA
aaagattttaacaagtataaa

SEQ ID NO: 7801 - DNA, 21 bp, Homo sapiens
  source 1..21: mol_type = other DNA
aagattttaacaagtataaaa

SEQ ID NO: 7802 - DNA, 21 bp, Homo sapiens
  source 1..21: mol_type = other DNA
taacaagtataaaaaattctc

SEQ ID NO: 7803 - DNA, 21 bp, Homo sapiens
  source 1..21: mol_type = other DNA
aacaagtataaaaaattctca

SEQ ID NO: 7804 - DNA, 21 bp, Homo sapiens
  source 1..21: mol_type = other DNA
acaagtataaaaaattctcat

SEQ ID NO: 7805 - DNA, 21 bp, Homo sapiens
  source 1..21: mol_type = other DNA
caagtataaaaaattctcata

SEQ ID NO: 7806 - DNA, 21 bp, Homo sapiens
  source 1..21: mol_type = other DNA
aagtataaaaaattctcatag

SEQ ID NO: 7807 - DNA, 21 bp, Homo sapiens
  source 1..21: mol_type = other DNA
agtataaaaaattctcatagg

SEQ ID NO: 7808 - DNA, 21 bp, Homo sapiens
  source 1..21: mol_type = other DNA
gtataaaaaattctcatagga

SEQ ID NO: 7809 - DNA, 21 bp, Homo sapiens
  source 1..21: mol_type = other DNA
tataaaaaattctcataggaa

SEQ ID NO: 7810 - DNA, 21 bp, Homo sapiens
  source 1..21: mol_type = other DNA
taaaaaattctcataggaatt

SEQ ID NO: 7811 - DNA, 21 bp, Homo sapiens
  source 1..21: mol_type = other DNA
aaaaaattctcataggaatta

SEQ ID NO: 7812 - DNA, 21 bp, Homo sapiens
  source 1..21: mol_type = other DNA
tgctctttcatagtataactt

SEQ ID NO: 7813 - DNA, 21 bp, Homo sapiens
  source 1..21: mol_type = other DNA
tttcatagtataactttaaat

SEQ ID NO: 7814 - DNA, 21 bp, Homo sapiens
  source 1..21: mol_type = other DNA
ttcatagtataactttaaatc

SEQ ID NO: 7815 - DNA, 21 bp, Homo sapiens
  source 1..21: mol_type = other DNA
actttaaatcttttcttcaac

SEQ ID NO: 7816 - DNA, 21 bp, Homo sapiens
  source 1..21: mol_type = other DNA
ctttaaatcttttcttcaact

SEQ ID NO: 7817 - DNA, 21 bp, Homo sapiens
  source 1..21: mol_type = other DNA
tcaacttgagtctttgaagat

SEQ ID NO: 7818 - DNA, 21 bp, Homo sapiens
  source 1..21: mol_type = other DNA
aacttgagtctttgaagatag

SEQ ID NO: 7819 - DNA, 21 bp, Homo sapiens
  source 1..21: mol_type = other DNA
acttgagtctttgaagatagt

SEQ ID NO: 7820 - DNA, 21 bp, Homo sapiens
  source 1..21: mol_type = other DNA
tgaagatagttttaattctgc

SEQ ID NO: 7821 - DNA, 21 bp, Homo sapiens
  source 1..21: mol_type = other DNA
gaagatagttttaattctgct

SEQ ID NO: 7822 - DNA, 21 bp, Homo sapiens
  source 1..21: mol_type = other DNA
aagatagttttaattctgctt

SEQ ID NO: 7823 - DNA, 21 bp, Homo sapiens
  source 1..21: mol_type = other DNA
tctgcttgtgacattaaaaga

SEQ ID NO: 7824 - DNA, 21 bp, Homo sapiens
  source 1..21: mol_type = other DNA
agagcattgcttttgtttctt

SEQ ID NO: 7825 - DNA, 21 bp, Homo sapiens
  source 1..21: mol_type = other DNA
gagcattgcttttgtttctta

SEQ ID NO: 7826 - DNA, 21 bp, Homo sapiens
  source 1..21: mol_type = other DNA
tgcttttgtttcttaagaaaa

SEQ ID NO: 7827 - DNA, 21 bp, Homo sapiens
  source 1..21: mol_type = other DNA
gtttcttaagaaaacaaactc

SEQ ID NO: 7828 - DNA, 21 bp, Homo sapiens
  source 1..21: mol_type = other DNA
tttcttaagaaaacaaactct

SEQ ID NO: 7829 - DNA, 21 bp, Homo sapiens
  source 1..21: mol_type = other DNA
ttcttaagaaaacaaactctt

SEQ ID NO: 7830 - DNA, 21 bp, Homo sapiens
  source 1..21: mol_type = other DNA
tcttaagaaaacaaactcttt

SEQ ID NO: 7831 - DNA, 21 bp, Homo sapiens
  source 1..21: mol_type = other DNA
cttaagaaaacaaactctttt

SEQ ID NO: 7832 - DNA, 21 bp, Homo sapiens
  source 1..21: mol_type = other DNA
ttaagaaaacaaactcttttt

SEQ ID NO: 7833 - DNA, 21 bp, Homo sapiens
  source 1..21: mol_type = other DNA
taagaaaacaaactctttttt

SEQ ID NO: 7834 - DNA, 21 bp, Homo sapiens
  source 1..21: mol_type = other DNA
aaaacaaactcttttttaaaa

SEQ ID NO: 7835 - DNA, 21 bp, Homo sapiens
  source 1..21: mol_type = other DNA
aactcttttttaaaaattact

SEQ ID NO: 7836 - DNA, 21 bp, Homo sapiens
  source 1..21: mol_type = other DNA
actcttttttaaaaattactt

SEQ ID NO: 7837 - DNA, 21 bp, Homo sapiens
  source 1..21: mol_type = other DNA
ctcttttttaaaaattacttt

SEQ ID NO: 7838 - DNA, 21 bp, Homo sapiens
  source 1..21: mol_type = other DNA
tcttttttaaaaattactttt

SEQ ID NO: 7839 - DNA, 21 bp, Homo sapiens
  source 1..21: mol_type = other DNA
cttttttaaaaattactttta

SEQ ID NO: 7840 - DNA, 21 bp, Homo sapiens
  source 1..21: mol_type = other DNA
ttttttaaaaattacttttaa

SEQ ID NO: 7841 - DNA, 21 bp, Homo sapiens
  source 1..21: mol_type = other DNA
tttttaaaaattacttttaaa

SEQ ID NO: 7842 - DNA, 21 bp, Homo sapiens
  source 1..21: mol_type = other DNA
ttttaaaaattacttttaaat

SEQ ID NO: 7843 - DNA, 21 bp, Homo sapiens
  source 1..21: mol_type = other DNA
tttaaaaattacttttaaata

SEQ ID NO: 7844 - DNA, 21 bp, Homo sapiens
  source 1..21: mol_type = other DNA
attacttttaaatattaactc

SEQ ID NO: 7845 - DNA, 21 bp, Homo sapiens
  source 1..21: mol_type = other DNA
ttacttttaaatattaactca

SEQ ID NO: 7846 - DNA, 21 bp, Homo sapiens
  source 1..21: mol_type = other DNA
acttttaaatattaactcaaa

SEQ ID NO: 7847 - DNA, 21 bp, Homo sapiens
  source 1..21: mol_type = other DNA
ttttaaatattaactcaaaag

SEQ ID NO: 7848 - DNA, 21 bp, Homo sapiens
  source 1..21: mol_type = other DNA
tttaaatattaactcaaaagt

SEQ ID NO: 7849 - DNA, 21 bp, Homo sapiens
  source 1..21: mol_type = other DNA
ttaaatattaactcaaaagtt

SEQ ID NO: 7850 - DNA, 21 bp, Homo sapiens
  source 1..21: mol_type = other DNA
taaatattaactcaaaagttg

SEQ ID NO: 7851 - DNA, 21 bp, Homo sapiens
  source 1..21: mol_type = other DNA
gtggtgtgccaagacattaat

SEQ ID NO: 7852 - DNA, 21 bp, Homo sapiens
  source 1..21: mol_type = other DNA
gtgccaagacattaatttttt

SEQ ID NO: 7853 - DNA, 21 bp, Homo sapiens
  source 1..21: mol_type = other DNA
tgccaagacattaattttttt

SEQ ID NO: 7854 - DNA, 21 bp, Homo sapiens
  source 1..21: mol_type = other DNA
gacattaattttttttttaaa

SEQ ID NO: 7855 - DNA, 21 bp, Homo sapiens
  source 1..21: mol_type = other DNA
acattaattttttttttaaac

SEQ ID NO: 7856 - DNA, 21 bp, Homo sapiens
  source 1..21: mol_type = other DNA
attaattttttttttaaacaa

SEQ ID NO: 7857 - DNA, 21 bp, Homo sapiens
  source 1..21: mol_type = other DNA
taattttttttttaaacaatg

SEQ ID NO: 7858 - DNA, 21 bp, Homo sapiens
  source 1..21: mol_type = other DNA
aattttttttttaaacaatga

SEQ ID NO: 7859 - DNA, 21 bp, Homo sapiens
  source 1..21: mol_type = other DNA
attttttttttaaacaatgaa

SEQ ID NO: 7860 - DNA, 21 bp, Homo sapiens
  source 1..21: mol_type = other DNA
ttttttttttaaacaatgaag

SEQ ID NO: 7861 - DNA, 21 bp, Homo sapiens
  source 1..21: mol_type = other DNA
tttttttttaaacaatgaagt

SEQ ID NO: 7862 - DNA, 21 bp, Homo sapiens
  source 1..21: mol_type = other DNA
tttttttaaacaatgaagtga

SEQ ID NO: 7863 - DNA, 21 bp, Homo sapiens
  source 1..21: mol_type = other DNA
ttttttaaacaatgaagtgaa

SEQ ID NO: 7864 - DNA, 21 bp, Homo sapiens
  source 1..21: mol_type = other DNA
tttttaaacaatgaagtgaaa

SEQ ID NO: 7865 - DNA, 21 bp, Homo sapiens
  source 1..21: mol_type = other DNA
caatgaagtgaaaaagtttta

SEQ ID NO: 7866 - DNA, 21 bp, Homo sapiens
  source 1..21: mol_type = other DNA
agtgaaaaagttttacaatct

SEQ ID NO: 7867 - DNA, 21 bp, Homo sapiens
  source 1..21: mol_type = other DNA
gtgaaaaagttttacaatctc

SEQ ID NO: 7868 - DNA, 21 bp, Homo sapiens
  source 1..21: mol_type = other DNA
tgaaaaagttttacaatctct

SEQ ID NO: 7869 - DNA, 21 bp, Homo sapiens
  source 1..21: mol_type = other DNA
acactggttaaattaacattg

SEQ ID NO: 7870 - DNA, 21 bp, Homo sapiens
  source 1..21: mol_type = other DNA
cactggttaaattaacattgc

SEQ ID NO: 7871 - DNA, 21 bp, Homo sapiens
  source 1..21: mol_type = other DNA
actggttaaattaacattgca

SEQ ID NO: 7872 - DNA, 21 bp, Homo sapiens
  source 1..21: mol_type = other DNA
taacattgcataaacactttt

SEQ ID NO: 7873 - DNA, 21 bp, Homo sapiens
  source 1..21: mol_type = other DNA
tttcaagtctgatccatattt

SEQ ID NO: 7874 - DNA, 21 bp, Homo sapiens
  source 1..21: mol_type = other DNA
gatccatatttaataatgctt

SEQ ID NO: 7875 - DNA, 21 bp, Homo sapiens
  source 1..21: mol_type = other DNA
atccatatttaataatgcttt

SEQ ID NO: 7876 - DNA, 21 bp, Homo sapiens
  source 1..21: mol_type = other DNA
tccatatttaataatgcttta

SEQ ID NO: 7877 - DNA, 21 bp, Homo sapiens
  source 1..21: mol_type = other DNA
ccatatttaataatgctttaa

SEQ ID NO: 7878 - DNA, 21 bp, Homo sapiens
  source 1..21: mol_type = other DNA
catatttaataatgctttaaa

SEQ ID NO: 7879 - DNA, 21 bp, Homo sapiens
  source 1..21: mol_type = other DNA
atatttaataatgctttaaaa

SEQ ID NO: 7880 - DNA, 21 bp, Homo sapiens
  source 1..21: mol_type = other DNA
atttaataatgctttaaaata

SEQ ID NO: 7881 - DNA, 21 bp, Homo sapiens
  source 1..21: mol_type = other DNA
tttaataatgctttaaaataa

SEQ ID NO: 7882 - DNA, 21 bp, Homo sapiens
  source 1..21: mol_type = other DNA
ttaataatgctttaaaataaa

SEQ ID NO: 7883 - DNA, 21 bp, Homo sapiens
  source 1..21: mol_type = other DNA
taataatgctttaaaataaaa

SEQ ID NO: 7884 - DNA, 21 bp, Homo sapiens
  source 1..21: mol_type = other DNA
gctttaaaataaaaataaaaa

SEQ ID NO: 7885 - DNA, 21 bp, Homo sapiens
  source 1..21: mol_type = other DNA
aaataaaaataaaaacaatcc

SEQ ID NO: 7886 - DNA, 21 bp, Homo sapiens
  source 1..21: mol_type = other DNA
aataaaaataaaaacaatcct

SEQ ID NO: 7887 - DNA, 21 bp, Homo sapiens
  source 1..21: mol_type = other DNA
ataaaaataaaaacaatcctt

SEQ ID NO: 7888 - DNA, 21 bp, Homo sapiens
  source 1..21: mol_type = other DNA
taaaaataaaaacaatccttt

SEQ ID NO: 7889 - DNA, 21 bp, Homo sapiens
  source 1..21: mol_type = other DNA
aaaaataaaaacaatcctttt

SEQ ID NO: 7890 - DNA, 21 bp, Homo sapiens
  source 1..21: mol_type = other DNA
aaaataaaaacaatccttttg

SEQ ID NO: 7891 - DNA, 21 bp, Homo sapiens
  source 1..21: mol_type = other DNA
aaataaaaacaatccttttga

SEQ ID NO: 7892 - DNA, 21 bp, Homo sapiens
  source 1..21: mol_type = other DNA
aataaaaacaatccttttgat

SEQ ID NO: 7893 - DNA, 21 bp, Homo sapiens
  source 1..21: mol_type = other DNA
aaaacaatccttttgataaat

SEQ ID NO: 7894 - DNA, 21 bp, Homo sapiens
  source 1..21: mol_type = other DNA
aatccttttgataaatttaaa

SEQ ID NO: 7895 - DNA, 21 bp, Homo sapiens
  source 1..21: mol_type = other DNA
atccttttgataaatttaaaa

SEQ ID NO: 7896 - DNA, 21 bp, Homo sapiens
  source 1..21: mol_type = other DNA
tccttttgataaatttaaaat

SEQ ID NO: 7897 - DNA, 21 bp, Homo sapiens
  source 1..21: mol_type = other DNA
tttgataaatttaaaatgtta

SEQ ID NO: 7898 - DNA, 21 bp, Homo sapiens
  source 1..21: mol_type = other DNA
ttgataaatttaaaatgttac

SEQ ID NO: 7899 - DNA, 21 bp, Homo sapiens
  source 1..21: mol_type = other DNA
tgataaatttaaaatgttact

SEQ ID NO: 7900 - DNA, 21 bp, Homo sapiens
  source 1..21: mol_type = other DNA
gataaatttaaaatgttactt

SEQ ID NO: 7901 - DNA, 21 bp, Homo sapiens
  source 1..21: mol_type = other DNA
ataaatttaaaatgttactta

SEQ ID NO: 7902 - DNA, 21 bp, Homo sapiens
  source 1..21: mol_type = other DNA
taaatttaaaatgttacttat

SEQ ID NO: 7903 - DNA, 21 bp, Homo sapiens
  source 1..21: mol_type = other DNA
aatttaaaatgttacttattt

SEQ ID NO: 7904 - DNA, 21 bp, Homo sapiens
  source 1..21: mol_type = other DNA
atttaaaatgttacttatttt

SEQ ID NO: 7905 - DNA, 21 bp, Homo sapiens
  source 1..21: mol_type = other DNA
tttaaaatgttacttatttta

SEQ ID NO: 7906 - DNA, 21 bp, Homo sapiens
  source 1..21: mol_type = other DNA
ttaaaatgttacttattttaa

SEQ ID NO: 7907 - DNA, 21 bp, Homo sapiens
  source 1..21: mol_type = other DNA
taaaatgttacttattttaaa

SEQ ID NO: 7908 - DNA, 21 bp, Homo sapiens
  source 1..21: mol_type = other DNA
aaatgttacttattttaaaat

SEQ ID NO: 7909 - DNA, 21 bp, Homo sapiens
  source 1..21: mol_type = other DNA
ttacttattttaaaataaatg

SEQ ID NO: 7910 - DNA, 21 bp, Homo sapiens
  source 1..21: mol_type = other DNA
acttattttaaaataaatgaa

SEQ ID NO: 7911 - DNA, 21 bp, Homo sapiens
  source 1..21: mol_type = other DNA
cttattttaaaataaatgaag

SEQ ID NO: 7912 - DNA, 21 bp, Homo sapiens
  source 1..21: mol_type = other DNA
attttaaaataaatgaagtga

SEQ ID NO: 7913 - DNA, 21 bp, Homo sapiens
  source 1..21: mol_type = other DNA
ttttaaaataaatgaagtgag

SEQ ID NO: 7914 - DNA, 21 bp, Homo sapiens
  source 1..21: mol_type = other DNA
tatccatttcttcatgttaaa

SEQ ID NO: 7915 - DNA, 21 bp, Homo sapiens
  source 1..21: mol_type = other DNA
atccatttcttcatgttaaaa

SEQ ID NO: 7916 - DNA, 21 bp, Homo sapiens
  source 1..21: mol_type = other DNA
atctcaaactcttagtttttt

SEQ ID NO: 7917 - DNA, 21 bp, Homo sapiens
  source 1..21: mol_type = other DNA
cttagttttttttttttacaa

SEQ ID NO: 7918 - DNA, 21 bp, Homo sapiens
  source 1..21: mol_type = other DNA
ttagttttttttttttacaac

SEQ ID NO: 7919 - DNA, 21 bp, Homo sapiens
  source 1..21: mol_type = other DNA
tagttttttttttttacaact

SEQ ID NO: 7920 - DNA, 21 bp, Homo sapiens
  source 1..21: mol_type = other DNA
agttttttttttttacaacta

SEQ ID NO: 7921 - DNA, 21 bp, Homo sapiens
  source 1..21: mol_type = other DNA
gttttttttttttacaactat

SEQ ID NO: 7922 - DNA, 21 bp, Homo sapiens
  source 1..21: mol_type = other DNA
ttttttttttttacaactatg

SEQ ID NO: 7923 - DNA, 21 bp, Homo sapiens
  source 1..21: mol_type = other DNA
tttttttttttacaactatgt

SEQ ID NO: 7924 - DNA, 21 bp, Homo sapiens
  source 1..21: mol_type = other DNA
ttttttttttacaactatgta

SEQ ID NO: 7925 - DNA, 21 bp, Homo sapiens
  source 1..21: mol_type = other DNA
tttttttttacaactatgtaa

SEQ ID NO: 7926 - DNA, 21 bp, Homo sapiens
  source 1..21: mol_type = other DNA
ttttttttacaactatgtaat

SEQ ID NO: 7927 - DNA, 21 bp, Homo sapiens
  source 1..21: mol_type = other DNA
tttttttacaactatgtaatt

SEQ ID NO: 7928 - DNA, 21 bp, Homo sapiens
  source 1..21: mol_type = other DNA
acaactatgtaatttatattc

SEQ ID NO: 7929 - DNA, 21 bp, Homo sapiens
  source 1..21: mol_type = other DNA
caactatgtaatttatattcc

SEQ ID NO: 7930 - DNA, 21 bp, Homo sapiens
  source 1..21: mol_type = other DNA
aactatgtaatttatattcca

SEQ ID NO: 7931 - DNA, 21 bp, Homo sapiens
  source 1..21: mol_type = other DNA
gtaatttatattccatttaca

SEQ ID NO: 7932 - DNA, 21 bp, Homo sapiens
  source 1..21: mol_type = other DNA
taatttatattccatttacat

SEQ ID NO: 7933 - DNA, 21 bp, Homo sapiens
  source 1..21: mol_type = other DNA
aatttatattccatttacata

SEQ ID NO: 7934 - DNA, 21 bp, Homo sapiens
  source 1..21: mol_type = other DNA
atttatattccatttacataa

SEQ ID NO: 7935 - DNA, 21 bp, Homo sapiens
  source 1..21: mol_type = other DNA
tttacataaggatacacttat

SEQ ID NO: 7936 - DNA, 21 bp, Homo sapiens
  source 1..21: mol_type = other DNA
cataaggatacacttatttgt

SEQ ID NO: 7937 - DNA, 21 bp, Homo sapiens
  source 1..21: mol_type = other DNA
caatctgtaaatttttaacct

SEQ ID NO: 7938 - DNA, 21 bp, Homo sapiens
  source 1..21: mol_type = other DNA
aatctgtaaatttttaaccta

SEQ ID NO: 7939 - DNA, 21 bp, Homo sapiens
  source 1..21: mol_type = other DNA
atctgtaaatttttaacctat

SEQ ID NO: 7940 - DNA, 21 bp, Homo sapiens
  source 1..21: mol_type = other DNA
tgtgcaagaggtgaagtttat

SEQ ID NO: 7941 - DNA, 21 bp, Homo sapiens
  source 1..21: mol_type = other DNA
tgcaagaggtgaagtttatat

SEQ ID NO: 7942 - DNA, 21 bp, Homo sapiens
  source 1..21: mol_type = other DNA
gcaagaggtgaagtttatatt

SEQ ID NO: 7943 - DNA, 21 bp, Homo sapiens
  source 1..21: mol_type = other DNA
aagaggtgaagtttatatttg

SEQ ID NO: 7944 - DNA, 21 bp, Homo sapiens
  source 1..21: mol_type = other DNA
agaggtgaagtttatatttga

SEQ ID NO: 7945 - DNA, 21 bp, Homo sapiens
  source 1..21: mol_type = other DNA
tgaagtttatatttgaatatc

SEQ ID NO: 7946 - DNA, 21 bp, Homo sapiens
  source 1..21: mol_type = other DNA
tgacttgatgcagttttaata

SEQ ID NO: 7947 - DNA, 21 bp, Homo sapiens
  source 1..21: mol_type = other DNA
acttgatgcagttttaatact

SEQ ID NO: 7948 - DNA, 21 bp, Homo sapiens
  source 1..21: mol_type = other DNA
gggatttgacctaatcactaa

SEQ ID NO: 7949 - DNA, 21 bp, Homo sapiens
  source 1..21: mol_type = other DNA
tgacctaatcactaattttca

SEQ ID NO: 7950 - DNA, 21 bp, Homo sapiens
  source 1..21: mol_type = other DNA
gacagtaggatttttcaaacc

SEQ ID NO: 7951 - DNA, 21 bp, Homo sapiens
  source 1..21: mol_type = other DNA
ccagtggaaggagaatttaat

SEQ ID NO: 7952 - DNA, 21 bp, Homo sapiens
  source 1..21: mol_type = other DNA
gtggaaggagaatttaataaa

SEQ ID NO: 7953 - DNA, 21 bp, Homo sapiens
  source 1..21: mol_type = other DNA
ggaaggagaatttaataaaga

SEQ ID NO: 7954 - DNA, 21 bp, Homo sapiens
  source 1..21: mol_type = other DNA
gaaggagaatttaataaagat

SEQ ID NO: 7955 - DNA, 21 bp, Homo sapiens
  source 1..21: mol_type = other DNA
gagaatttaataaagatagtg

SEQ ID NO: 7956 - DNA, 21 bp, Homo sapiens
  source 1..21: mol_type = other DNA
attccttaggtaatctataac

SEQ ID NO: 7957 - DNA, 21 bp, Homo sapiens
  source 1..21: mol_type = other DNA
ttccttaggtaatctataact

SEQ ID NO: 7958 - DNA, 21 bp, Homo sapiens
  source 1..21: mol_type = other DNA
gtaacagtaatacattccatt

SEQ ID NO: 7959 - DNA, 21 bp, Homo sapiens
  source 1..21: mol_type = other DNA
aacagtaatacattccattgt

SEQ ID NO: 7960 - DNA, 21 bp, Homo sapiens
  source 1..21: mol_type = other DNA
acagtaatacattccattgtt

SEQ ID NO: 7961 - DNA, 21 bp, Homo sapiens
  source 1..21: mol_type = other DNA
cagtaatacattccattgttt

SEQ ID NO: 7962 - DNA, 21 bp, Homo sapiens
  source 1..21: mol_type = other DNA
ttccattgttttagtaaccag

SEQ ID NO: 7963 - DNA, 21 bp, Homo sapiens
  source 1..21: mol_type = other DNA
taaccagaaatcttcatgcaa

SEQ ID NO: 7964 - DNA, 21 bp, Homo sapiens
  source 1..21: mol_type = other DNA
tcttcatgcaatgaaaaatac

SEQ ID NO: 7965 - DNA, 21 bp, Homo sapiens
  source 1..21: mol_type = other DNA
gcaatgaaaaatactttaatt

SEQ ID NO: 7966 - DNA, 21 bp, Homo sapiens
  source 1..21: mol_type = other DNA
aatgaaaaatactttaattca

SEQ ID NO: 7967 - DNA, 21 bp, Homo sapiens
  source 1..21: mol_type = other DNA
atgaaaaatactttaattcat

SEQ ID NO: 7968 - DNA, 21 bp, Homo sapiens
  source 1..21: mol_type = other DNA
aattcatgaagcttacttttt

SEQ ID NO: 7969 - DNA, 21 bp, Homo sapiens
  source 1..21: mol_type = other DNA
tcatgaagcttactttttttt

SEQ ID NO: 7970 - DNA, 21 bp, Homo sapiens
  source 1..21: mol_type = other DNA
gaagcttactttttttttttg

SEQ ID NO: 7971 - DNA, 21 bp, Homo sapiens
  source 1..21: mol_type = other DNA
cttactttttttttttggtgt

SEQ ID NO: 7972 - DNA, 21 bp, Homo sapiens
  source 1..21: mol_type = other DNA
ttactttttttttttggtgtc

SEQ ID NO: 7973 - DNA, 21 bp, Homo sapiens
  source 1..21: mol_type = other DNA
tcaactaatttttgtattttt

SEQ ID NO: 7974 - DNA, 21 bp, Homo sapiens
  source 1..21: mol_type = other DNA
actaatttttgtatttttagg

SEQ ID NO: 7975 - DNA, 21 bp, Homo sapiens
  source 1..21: mol_type = other DNA
aactcatttattcagcaaata

SEQ ID NO: 7976 - DNA, 21 bp, Homo sapiens
  source 1..21: mol_type = other DNA
ctcatttattcagcaaatatt

SEQ ID NO: 7977 - DNA, 21 bp, Homo sapiens
  source 1..21: mol_type = other DNA
catttattcagcaaatattta

SEQ ID NO: 7978 - DNA, 21 bp, Homo sapiens
  source 1..21: mol_type = other DNA
cgtattttagttttgcaaaga

SEQ ID NO: 7979 - DNA, 21 bp, Homo sapiens
  source 1..21: mol_type = other DNA
agctctataattgttttgcta

SEQ ID NO: 7980 - DNA, 21 bp, Homo sapiens
  source 1..21: mol_type = other DNA
gctactttatgtaaatcactt

SEQ ID NO: 7981 - DNA, 21 bp, Homo sapiens
  source 1..21: mol_type = other DNA
ctactttatgtaaatcacttc

SEQ ID NO: 7982 - DNA, 21 bp, Homo sapiens
  source 1..21: mol_type = other DNA
tactttatgtaaatcacttca

SEQ ID NO: 7983 - DNA, 21 bp, Homo sapiens
  source 1..21: mol_type = other DNA
actttatgtaaatcacttcat

SEQ ID NO: 7984 - DNA, 21 bp, Homo sapiens
  source 1..21: mol_type = other DNA
ctttatgtaaatcacttcatt

SEQ ID NO: 7985 - DNA, 21 bp, Homo sapiens
  source 1..21: mol_type = other DNA
tttatgtaaatcacttcattg

SEQ ID NO: 7986 - DNA, 21 bp, Homo sapiens
  source 1..21: mol_type = other DNA
ttatgtaaatcacttcattgt

SEQ ID NO: 7987 - DNA, 21 bp, Homo sapiens
  source 1..21: mol_type = other DNA
tcattgttttaaaggaataaa

SEQ ID NO: 7988 - DNA, 21 bp, Homo sapiens
  source 1..21: mol_type = other DNA
cattgttttaaaggaataaac

SEQ ID NO: 7989 - DNA, 21 bp, Homo sapiens
  source 1..21: mol_type = other DNA
tgttttaaaggaataaacttg

SEQ ID NO: 7990 - DNA, 21 bp, Homo sapiens
  source 1..21: mol_type = other DNA
gttttaaaggaataaacttga

SEQ ID NO: 7991 - DNA, 21 bp, Homo sapiens
  source 1..21: mol_type = other DNA
ttttaaaggaataaacttgat

SEQ ID NO: 7992 - DNA, 21 bp, Homo sapiens
  source 1..21: mol_type = other DNA
ttaaaggaataaacttgatta

SEQ ID NO: 7993 - DNA, 21 bp, Homo sapiens
  source 1..21: mol_type = other DNA
taaaggaataaacttgattat

SEQ ID NO: 7994 - DNA, 21 bp, Homo sapiens
  source 1..21: mol_type = other DNA
aaaggaataaacttgattata

SEQ ID NO: 7995 - DNA, 21 bp, Homo sapiens
  source 1..21: mol_type = other DNA
aaggaataaacttgattatat

SEQ ID NO: 7996 - DNA, 21 bp, Homo sapiens
  source 1..21: mol_type = other DNA
aggaataaacttgattatatt

SEQ ID NO: 7997 - DNA, 21 bp, Homo sapiens
  source 1..21: mol_type = other DNA
taaacttgattatattgtttt

SEQ ID NO: 7998 - DNA, 21 bp, Homo sapiens
  source 1..21: mol_type = other DNA
aaacttgattatattgttttt

SEQ ID NO: 7999 - DNA, 21 bp, Homo sapiens
  source 1..21: mol_type = other DNA
cttgattatattgttttttta

SEQ ID NO: 8000 - DNA, 21 bp, Homo sapiens
  source 1..21: mol_type = other DNA
ttatattgtttttttatttgg

SEQ ID NO: 8001 - DNA, 21 bp, Homo sapiens
  source 1..21: mol_type = other DNA
tatattgtttttttatttggc

SEQ ID NO: 8002 - DNA, 21 bp, Homo sapiens
  source 1..21: mol_type = other DNA
ttgtttttttatttggcataa

SEQ ID NO: 8003 - DNA, 21 bp, Homo sapiens
  source 1..21: mol_type = other DNA
tgtttttttatttggcataac

SEQ ID NO: 8004 - DNA, 21 bp, Homo sapiens
  source 1..21: mol_type = other DNA
tggcataactgtgattctttt

SEQ ID NO: 8005 - DNA, 21 bp, Homo sapiens
  source 1..21: mol_type = other DNA
taactgtgattcttttaggac

SEQ ID NO: 8006 - DNA, 21 bp, Homo sapiens
  source 1..21: mol_type = other DNA
aactgtgattcttttaggaca

SEQ ID NO: 8007 - DNA, 21 bp, Homo sapiens
  source 1..21: mol_type = other DNA
aaggtgtatgtcagatattca

SEQ ID NO: 8008 - DNA, 21 bp, Homo sapiens
  source 1..21: mol_type = other DNA
aggtgtatgtcagatattcat

SEQ ID NO: 8009 - DNA, 21 bp, Homo sapiens
  source 1..21: mol_type = other DNA
cccaaatgtgtaatattccag

SEQ ID NO: 8010 - DNA, 21 bp, Homo sapiens
  source 1..21: mol_type = other DNA
tgcataagtaattaaaatata

SEQ ID NO: 8011 - DNA, 21 bp, Homo sapiens
  source 1..21: mol_type = other DNA
gcataagtaattaaaatatac

SEQ ID NO: 8012 - DNA, 21 bp, Homo sapiens
  source 1..21: mol_type = other DNA
cataagtaattaaaatatact

SEQ ID NO: 8013 - DNA, 21 bp, Homo sapiens
  source 1..21: mol_type = other DNA
ataagtaattaaaatatactt

SEQ ID NO: 8014 - DNA, 21 bp, Homo sapiens
  source 1..21: mol_type = other DNA
taagtaattaaaatatactta

SEQ ID NO: 8015 - DNA, 21 bp, Homo sapiens
  source 1..21: mol_type = other DNA
aagtaattaaaatatacttaa

SEQ ID NO: 8016 - DNA, 21 bp, Homo sapiens
  source 1..21: mol_type = other DNA
agtaattaaaatatacttaaa

SEQ ID NO: 8017 - DNA, 21 bp, Homo sapiens
  source 1..21: mol_type = other DNA
gtaattaaaatatacttaaaa

SEQ ID NO: 8018 - DNA, 21 bp, Homo sapiens
  source 1..21: mol_type = other DNA
taattaaaatatacttaaaaa

SEQ ID NO: 8019 - DNA, 21 bp, Homo sapiens
  source 1..21: mol_type = other DNA
attaaaatatacttaaaaatt

SEQ ID NO: 8020 - DNA, 21 bp, Homo sapiens
  source 1..21: mol_type = other DNA
ttaaaatatacttaaaaatta

SEQ ID NO: 8021 - DNA, 21 bp, Homo sapiens
  source 1..21: mol_type = other DNA
taaaatatacttaaaaattaa

SEQ ID NO: 8022 - DNA, 21 bp, Homo sapiens
  source 1..21: mol_type = other DNA
aaaatatacttaaaaattaat

SEQ ID NO: 8023 - DNA, 21 bp, Homo sapiens
  source 1..21: mol_type = other DNA
tatacttaaaaattaatagtt

SEQ ID NO: 8024 - DNA, 21 bp, Homo sapiens
  source 1..21: mol_type = other DNA
cttaaaaattaatagttttat

SEQ ID NO: 8025 - DNA, 21 bp, Homo sapiens
  source 1..21: mol_type = other DNA
ttaaaaattaatagttttatc

SEQ ID NO: 8026 - DNA, 21 bp, Homo sapiens
  source 1..21: mol_type = other DNA
taaaaattaatagttttatct

SEQ ID NO: 8027 - DNA, 21 bp, Homo sapiens
  source 1..21: mol_type = other DNA
ttatctgggtacaaataaaca

SEQ ID NO: 8028 - DNA, 21 bp, Homo sapiens
  source 1..21: mol_type = other DNA
cagacaaggaaacttctatgt

SEQ ID NO: 8029 - DNA, 21 bp, Homo sapiens
  source 1..21: mol_type = other DNA
agacaaggaaacttctatgta

SEQ ID NO: 8030 - DNA, 21 bp, Homo sapiens
  source 1..21: mol_type = other DNA
gacaaggaaacttctatgtaa

SEQ ID NO: 8031 - DNA, 21 bp, Homo sapiens
  source 1..21: mol_type = other DNA
acttctatgtaaaaatcacta

SEQ ID NO: 8032 - DNA, 21 bp, Homo sapiens
  source 1..21: mol_type = other DNA
cttctatgtaaaaatcactat

SEQ ID NO: 8033 - DNA, 21 bp, Homo sapiens
  source 1..21: mol_type = other DNA
ttctatgtaaaaatcactatg

SEQ ID NO: 8034 - DNA, 21 bp, Homo sapiens
  source 1..21: mol_type = other DNA
atgtaaaaatcactatgattt

SEQ ID NO: 8035 - DNA, 21 bp, Homo sapiens
  source 1..21: mol_type = other DNA
tgtaaaaatcactatgatttc

SEQ ID NO: 8036 - DNA, 21 bp, Homo sapiens
  source 1..21: mol_type = other DNA
cactatgatttctgaattgct

SEQ ID NO: 8037 - DNA, 21 bp, Homo sapiens
  source 1..21: mol_type = other DNA
actatgatttctgaattgcta

SEQ ID NO: 8038 - DNA, 21 bp, Homo sapiens
  source 1..21: mol_type = other DNA
gctatgtgaaactacagatct

SEQ ID NO: 8039 - DNA, 21 bp, Homo sapiens
  source 1..21: mol_type = other DNA
ctatgtgaaactacagatctt

SEQ ID NO: 8040 - DNA, 21 bp, Homo sapiens
  source 1..21: mol_type = other DNA
gtagggtgttaagacttacac

SEQ ID NO: 8041 - DNA, 21 bp, Homo sapiens
  source 1..21: mol_type = other DNA
tatttaggcctcttgaatttt

SEQ ID NO: 8042 - DNA, 21 bp, Homo sapiens
  source 1..21: mol_type = other DNA
cctcttgaatttttgatgtag

SEQ ID NO: 8043 - DNA, 21 bp, Homo sapiens
  source 1..21: mol_type = other DNA
ctcttgaatttttgatgtaga

SEQ ID NO: 8044 - DNA, 21 bp, Homo sapiens
  source 1..21: mol_type = other DNA
tgtagatgggcatttttttaa

SEQ ID NO: 8045 - DNA, 21 bp, Homo sapiens
  source 1..21: mol_type = other DNA
tgggcatttttttaaggtagt

SEQ ID NO: 8046 - DNA, 21 bp, Homo sapiens
  source 1..21: mol_type = other DNA
taaggtagtggttaattacct

SEQ ID NO: 8047 - DNA, 21 bp, Homo sapiens
  source 1..21: mol_type = other DNA
aggtagtggttaattaccttt

SEQ ID NO: 8048 - DNA, 21 bp, Homo sapiens
  source 1..21: mol_type = other DNA
ggtagtggttaattaccttta

SEQ ID NO: 8049 - DNA, 21 bp, Homo sapiens
  source 1..21: mol_type = other DNA
gtagtggttaattacctttat

SEQ ID NO: 8050 - DNA, 21 bp, Homo sapiens
  source 1..21: mol_type = other DNA
tagtggttaattacctttatg

SEQ ID NO: 8051 - DNA, 21 bp, Homo sapiens
  source 1..21: mol_type = other DNA
ttacctttatgtgaactttga

SEQ ID NO: 8052 - DNA, 21 bp, Homo sapiens
  source 1..21: mol_type = other DNA
tttatgtgaactttgaatggt

SEQ ID NO: 8053 - DNA, 21 bp, Homo sapiens
  source 1..21: mol_type = other DNA
tgaactttgaatggtttaaca

SEQ ID NO: 8054 - DNA, 21 bp, Homo sapiens
  source 1..21: mol_type = other DNA
ctttgaatggtttaacaaaag

SEQ ID NO: 8055 - DNA, 21 bp, Homo sapiens
  source 1..21: mol_type = other DNA
tttgaatggtttaacaaaaga

SEQ ID NO: 8056 - DNA, 21 bp, Homo sapiens
  source 1..21: mol_type = other DNA
ttgaatggtttaacaaaagat

SEQ ID NO: 8057 - DNA, 21 bp, Homo sapiens
  source 1..21: mol_type = other DNA
tgaatggtttaacaaaagatt

SEQ ID NO: 8058 - DNA, 21 bp, Homo sapiens
  source 1..21: mol_type = other DNA
gaatggtttaacaaaagattt

SEQ ID NO: 8059 - DNA, 21 bp, Homo sapiens
  source 1..21: mol_type = other DNA
atggtttaacaaaagatttgt

SEQ ID NO: 8060 - DNA, 21 bp, Homo sapiens
  source 1..21: mol_type = other DNA
tggtttaacaaaagatttgtt

SEQ ID NO: 8061 - DNA, 21 bp, Homo sapiens
  source 1..21: mol_type = other DNA
ttaacaaaagatttgtttttg

SEQ ID NO: 8062 - DNA, 21 bp, Homo sapiens
  source 1..21: mol_type = other DNA
taacaaaagatttgtttttgt

SEQ ID NO: 8063 - DNA, 21 bp, Homo sapiens
  source 1..21: mol_type = other DNA
aacaaaagatttgtttttgta

SEQ ID NO: 8064 - DNA, 21 bp, Homo sapiens
  source 1..21: mol_type = other DNA
caaaagatttgtttttgtaga

SEQ ID NO: 8065 - DNA, 21 bp, Homo sapiens
  source 1..21: mol_type = other DNA
aaaagatttgtttttgtagag

SEQ ID NO: 8066 - DNA, 21 bp, Homo sapiens
  source 1..21: mol_type = other DNA
aaagatttgtttttgtagaga

SEQ ID NO: 8067 - DNA, 21 bp, Homo sapiens
  source 1..21: mol_type = other DNA
aagatttgtttttgtagagat

SEQ ID NO: 8068 - DNA, 21 bp, Homo sapiens
  source 1..21: mol_type = other DNA
tgtttttgtagagattttaaa

SEQ ID NO: 8069 - DNA, 21 bp, Homo sapiens
  source 1..21: mol_type = other DNA
taaagggggagaattctagaa

SEQ ID NO: 8070 - DNA, 21 bp, Homo sapiens
  source 1..21: mol_type = other DNA
aagggggagaattctagaaat

SEQ ID NO: 8071 - DNA, 21 bp, Homo sapiens
  source 1..21: mol_type = other DNA
agggggagaattctagaaata

SEQ ID NO: 8072 - DNA, 21 bp, Homo sapiens
  source 1..21: mol_type = other DNA
gggggagaattctagaaataa

SEQ ID NO: 8073 - DNA, 21 bp, Homo sapiens
  source 1..21: mol_type = other DNA
ggggagaattctagaaataaa

SEQ ID NO: 8074 - DNA, 21 bp, Homo sapiens
  source 1..21: mol_type = other DNA
gggagaattctagaaataaat

SEQ ID NO: 8075 - DNA, 21 bp, Homo sapiens
  source 1..21: mol_type = other DNA
aattctagaaataaatgttac

SEQ ID NO: 8076 - DNA, 21 bp, Homo sapiens
  source 1..21: mol_type = other DNA
attctagaaataaatgttacc

SEQ ID NO: 8077 - DNA, 21 bp, Homo sapiens
  source 1..21: mol_type = other DNA
ttctagaaataaatgttacct

SEQ ID NO: 8078 - DNA, 21 bp, Homo sapiens
  source 1..21: mol_type = other DNA
tctagaaataaatgttaccta

SEQ ID NO: 8079 - DNA, 21 bp, Homo sapiens
  source 1..21: mol_type = other DNA
ctagaaataaatgttacctaa

SEQ ID NO: 8080 - DNA, 21 bp, Homo sapiens
  source 1..21: mol_type = other DNA
agaaataaatgttacctaatt

SEQ ID NO: 8081 - DNA, 21 bp, Homo sapiens
  source 1..21: mol_type = other DNA
ttacctaattattacagcctt

SEQ ID NO: 8082 - DNA, 21 bp, Homo sapiens
  source 1..21: mol_type = other DNA
tacctaattattacagcctta

SEQ ID NO: 8083 - DNA, 21 bp, Homo sapiens
  source 1..21: mol_type = other DNA
agccttaaagacaaaaatcct

SEQ ID NO: 8084 - DNA, 21 bp, Homo sapiens
  source 1..21: mol_type = other DNA
cttaaagacaaaaatccttgt

SEQ ID NO: 8085 - DNA, 21 bp, Homo sapiens
  source 1..21: mol_type = other DNA
aatccttgttgaagttttttt

SEQ ID NO: 8086 - DNA, 21 bp, Homo sapiens
  source 1..21: mol_type = other DNA
atccttgttgaagttttttta

SEQ ID NO: 8087 - DNA, 21 bp, Homo sapiens
  source 1..21: mol_type = other DNA
ccttgttgaagtttttttaaa

SEQ ID NO: 8088 - DNA, 21 bp, Homo sapiens
  source 1..21: mol_type = other DNA
cttgttgaagtttttttaaaa

SEQ ID NO: 8089 - DNA, 21 bp, Homo sapiens
  source 1..21: mol_type = other DNA
ttgaagtttttttaaaaaaag

SEQ ID NO: 8090 - DNA, 21 bp, Homo sapiens
  source 1..21: mol_type = other DNA
tgaagtttttttaaaaaaagc

SEQ ID NO: 8091 - DNA, 21 bp, Homo sapiens
  source 1..21: mol_type = other DNA
gaagtttttttaaaaaaagct

SEQ ID NO: 8092 - DNA, 21 bp, Homo sapiens
  source 1..21: mol_type = other DNA
aagtttttttaaaaaaagcta

SEQ ID NO: 8093 - DNA, 21 bp, Homo sapiens
  source 1..21: mol_type = other DNA
agtttttttaaaaaaagctaa

SEQ ID NO: 8094 - DNA, 21 bp, Homo sapiens
  source 1..21: mol_type = other DNA
tttttaaaaaaagctaaatta

SEQ ID NO: 8095 - DNA, 21 bp, Homo sapiens
  source 1..21: mol_type = other DNA
tttaaaaaaagctaaattaca

SEQ ID NO: 8096 - DNA, 21 bp, Homo sapiens
  source 1..21: mol_type = other DNA
agacttaggcattaacatgtt

SEQ ID NO: 8097 - DNA, 21 bp, Homo sapiens
  source 1..21: mol_type = other DNA
gacttaggcattaacatgttt

SEQ ID NO: 8098 - DNA, 21 bp, Homo sapiens
  source 1..21: mol_type = other DNA
atagcagacgtatattgtatc

SEQ ID NO: 8099 - DNA, 21 bp, Homo sapiens
  source 1..21: mol_type = other DNA
cagacgtatattgtatcattt

SEQ ID NO: 8100 - DNA, 21 bp, Homo sapiens
  source 1..21: mol_type = other DNA
gacgtatattgtatcatttga

SEQ ID NO: 8101 - DNA, 21 bp, Homo sapiens
  source 1..21: mol_type = other DNA
gtatattgtatcatttgagtg

SEQ ID NO: 8102 - DNA, 21 bp, Homo sapiens
  source 1..21: mol_type = other DNA
tatattgtatcatttgagtga

SEQ ID NO: 8103 - DNA, 21 bp, Homo sapiens
  source 1..21: mol_type = other DNA
atattgtatcatttgagtgaa

SEQ ID NO: 8104 - DNA, 21 bp, Homo sapiens
  source 1..21: mol_type = other DNA
gcataggaatttagaacctaa

SEQ ID NO: 8105 - DNA, 21 bp, Homo sapiens
  source 1..21: mol_type = other DNA
cataggaatttagaacctaac

SEQ ID NO: 8106 - DNA, 21 bp, Homo sapiens
  source 1..21: mol_type = other DNA
ggaatttagaacctaactttt

SEQ ID NO: 8107 - DNA, 21 bp, Homo sapiens
  source 1..21: mol_type = other DNA
gaatttagaacctaactttta

SEQ ID NO: 8108 - DNA, 21 bp, Homo sapiens
  source 1..21: mol_type = other DNA
aatttagaacctaacttttat

SEQ ID NO: 8109 - DNA, 21 bp, Homo sapiens
  source 1..21: mol_type = other DNA
atttagaacctaacttttata

SEQ ID NO: 8110 - DNA, 21 bp, Homo sapiens
  source 1..21: mol_type = other DNA
acttttataggttatcaaaac

SEQ ID NO: 8111 - DNA, 21 bp, Homo sapiens
  source 1..21: mol_type = other DNA
ttttataggttatcaaaactg

SEQ ID NO: 8112 - DNA, 21 bp, Homo sapiens
  source 1..21: mol_type = other DNA
acaattttgtcctaatatata

SEQ ID NO: 8113 - DNA, 21 bp, Homo sapiens
  source 1..21: mol_type = other DNA
caattttgtcctaatatatac

SEQ ID NO: 8114 - DNA, 21 bp, Homo sapiens
  source 1..21: mol_type = other DNA
aattttgtcctaatatataca

SEQ ID NO: 8115 - DNA, 21 bp, Homo sapiens
  source 1..21: mol_type = other DNA
gtcctaatatatacatagaaa

SEQ ID NO: 8116 - DNA, 21 bp, Homo sapiens
  source 1..21: mol_type = other DNA
aatatatacatagaaactttg

SEQ ID NO: 8117 - DNA, 21 bp, Homo sapiens
  source 1..21: mol_type = other DNA
tgcacaagttcatctcatttg

SEQ ID NO: 8118 - DNA, 21 bp, Homo sapiens
  source 1..21: mol_type = other DNA
atctcatttgtattccattga

SEQ ID NO: 8119 - DNA, 21 bp, Homo sapiens
  source 1..21: mol_type = other DNA
tctcatttgtattccattgat

SEQ ID NO: 8120 - DNA, 21 bp, Homo sapiens
  source 1..21: mol_type = other DNA
ctcatttgtattccattgatt

SEQ ID NO: 8121 - DNA, 21 bp, Homo sapiens
  source 1..21: mol_type = other DNA
tcatttgtattccattgattt

SEQ ID NO: 8122 - DNA, 21 bp, Homo sapiens
  source 1..21: mol_type = other DNA
catttgtattccattgatttt

SEQ ID NO: 8123 - DNA, 21 bp, Homo sapiens
  source 1..21: mol_type = other DNA
atttgtattccattgattttt

SEQ ID NO: 8124 - DNA, 21 bp, Homo sapiens
  source 1..21: mol_type = other DNA
tttgtattccattgatttttt

SEQ ID NO: 8125 - DNA, 21 bp, Homo sapiens
  source 1..21: mol_type = other DNA
tccattgattttttttttctt

SEQ ID NO: 8126 - DNA, 21 bp, Homo sapiens
  source 1..21: mol_type = other DNA
ccattgattttttttttcttc

SEQ ID NO: 8127 - DNA, 21 bp, Homo sapiens
  source 1..21: mol_type = other DNA
tgattttttttttcttctaaa

SEQ ID NO: 8128 - DNA, 21 bp, Homo sapiens
  source 1..21: mol_type = other DNA
gattttttttttcttctaaac

SEQ ID NO: 8129 - DNA, 21 bp, Homo sapiens
  source 1..21: mol_type = other DNA
attttttttttcttctaaaca

SEQ ID NO: 8130 - DNA, 21 bp, Homo sapiens
  source 1..21: mol_type = other DNA
ttttttttttcttctaaacat

SEQ ID NO: 8131 - DNA, 21 bp, Homo sapiens
  source 1..21: mol_type = other DNA
tttttttttcttctaaacatt

SEQ ID NO: 8132 - DNA, 21 bp, Homo sapiens
  source 1..21: mol_type = other DNA
taaacattttttcttcaaaca

SEQ ID NO: 8133 - DNA, 21 bp, Homo sapiens
  source 1..21: mol_type = other DNA
aaacattttttcttcaaacag

SEQ ID NO: 8134 - DNA, 21 bp, Homo sapiens
  source 1..21: mol_type = other DNA
aacattttttcttcaaacagt

SEQ ID NO: 8135 - DNA, 21 bp, Homo sapiens
  source 1..21: mol_type = other DNA
acattttttcttcaaacagta

SEQ ID NO: 8136 - DNA, 21 bp, Homo sapiens
  source 1..21: mol_type = other DNA
cattttttcttcaaacagtat

SEQ ID NO: 8137 - DNA, 21 bp, Homo sapiens
  source 1..21: mol_type = other DNA
tcttcaaacagtatataactt

SEQ ID NO: 8138 - DNA, 21 bp, Homo sapiens
  source 1..21: mol_type = other DNA
aaacagtatataacttttttt

SEQ ID NO: 8139 - DNA, 21 bp, Homo sapiens
  source 1..21: mol_type = other DNA
aacagtatataacttttttta

SEQ ID NO: 8140 - DNA, 21 bp, Homo sapiens
  source 1..21: mol_type = other DNA
acagtatataactttttttag

SEQ ID NO: 8141 - DNA, 21 bp, Homo sapiens
  source 1..21: mol_type = other DNA
cagtatataactttttttagg

SEQ ID NO: 8142 - DNA, 21 bp, Homo sapiens
  source 1..21: mol_type = other DNA
ataactttttttaggggattt

SEQ ID NO: 8143 - DNA, 21 bp, Homo sapiens
  source 1..21: mol_type = other DNA
taactttttttaggggatttt

SEQ ID NO: 8144 - DNA, 21 bp, Homo sapiens
  source 1..21: mol_type = other DNA
aggggatttttttttagacag

SEQ ID NO: 8145 - DNA, 21 bp, Homo sapiens
  source 1..21: mol_type = other DNA
ggggatttttttttagacagc

SEQ ID NO: 8146 - DNA, 21 bp, Homo sapiens
  source 1..21: mol_type = other DNA
gggatttttttttagacagca

SEQ ID NO: 8147 - DNA, 21 bp, Homo sapiens
  source 1..21: mol_type = other DNA
tctgaagatttccatttgtca

SEQ ID NO: 8148 - DNA, 21 bp, Homo sapiens
  source 1..21: mol_type = other DNA
ctgaagatttccatttgtcaa

SEQ ID NO: 8149 - DNA, 21 bp, Homo sapiens
  source 1..21: mol_type = other DNA
tgaagatttccatttgtcaaa

SEQ ID NO: 8150 - DNA, 21 bp, Homo sapiens
  source 1..21: mol_type = other DNA
gaagatttccatttgtcaaaa

SEQ ID NO: 8151 - DNA, 21 bp, Homo sapiens
  source 1..21: mol_type = other DNA
tttccatttgtcaaaaagtaa

SEQ ID NO: 8152 - DNA, 21 bp, Homo sapiens
  source 1..21: mol_type = other DNA
ttccatttgtcaaaaagtaat

SEQ ID NO: 8153 - DNA, 21 bp, Homo sapiens
  source 1..21: mol_type = other DNA
tccatttgtcaaaaagtaatg

SEQ ID NO: 8154 - DNA, 21 bp, Homo sapiens
  source 1..21: mol_type = other DNA
ttgtcaaaaagtaatgatttc

SEQ ID NO: 8155 - DNA, 21 bp, Homo sapiens
  source 1..21: mol_type = other DNA
tgtcaaaaagtaatgatttct

SEQ ID NO: 8156 - DNA, 21 bp, Homo sapiens
  source 1..21: mol_type = other DNA
gtcaaaaagtaatgatttctt

SEQ ID NO: 8157 - DNA, 21 bp, Homo sapiens
  source 1..21: mol_type = other DNA
tcaaaaagtaatgatttcttg

SEQ ID NO: 8158 - DNA, 21 bp, Homo sapiens
  source 1..21: mol_type = other DNA
aaaaagtaatgatttcttgat

SEQ ID NO: 8159 - DNA, 21 bp, Homo sapiens
  source 1..21: mol_type = other DNA
aaagtaatgatttcttgataa

SEQ ID NO: 8160 - DNA, 21 bp, Homo sapiens
  source 1..21: mol_type = other DNA
aagtaatgatttcttgataat

SEQ ID NO: 8161 - DNA, 21 bp, Homo sapiens
  source 1..21: mol_type = other DNA
gtaatgatttcttgataattg

SEQ ID NO: 8162 - DNA, 21 bp, Homo sapiens
  source 1..21: mol_type = other DNA
taatgatttcttgataattgt

SEQ ID NO: 8163 - DNA, 21 bp, Homo sapiens
  source 1..21: mol_type = other DNA
atttcttgataattgtgtagt

SEQ ID NO: 8164 - DNA, 21 bp, Homo sapiens
  source 1..21: mol_type = other DNA
tttcttgataattgtgtagta

SEQ ID NO: 8165 - DNA, 21 bp, Homo sapiens
  source 1..21: mol_type = other DNA
ttcttgataattgtgtagtaa

SEQ ID NO: 8166 - DNA, 21 bp, Homo sapiens
  source 1..21: mol_type = other DNA
cttgataattgtgtagtaatg

SEQ ID NO: 8167 - DNA, 21 bp, Homo sapiens
  source 1..21: mol_type = other DNA
gataattgtgtagtaatgttt

SEQ ID NO: 8168 - DNA, 21 bp, Homo sapiens
  source 1..21: mol_type = other DNA
taattgtgtagtaatgttttt

SEQ ID NO: 8169 - DNA, 21 bp, Homo sapiens
  source 1..21: mol_type = other DNA
aattgtgtagtaatgtttttt

SEQ ID NO: 8170 - DNA, 21 bp, Homo sapiens
  source 1..21: mol_type = other DNA
taccttaaagctgaatttata

SEQ ID NO: 8171 - DNA, 21 bp, Homo sapiens
  source 1..21: mol_type = other DNA
ccttaaagctgaatttatatt

SEQ ID NO: 8172 - DNA, 21 bp, Homo sapiens
  source 1..21: mol_type = other DNA
tgaatttatatttagtaactt

SEQ ID NO: 8173 - DNA, 21 bp, Homo sapiens
  source 1..21: mol_type = other DNA
gaatttatatttagtaacttc

SEQ ID NO: 8174 - DNA, 21 bp, Homo sapiens
  source 1..21: mol_type = other DNA
aatttatatttagtaacttct

SEQ ID NO: 8175 - DNA, 21 bp, Homo sapiens
  source 1..21: mol_type = other DNA
atatttagtaacttctgtgtt

SEQ ID NO: 8176 - DNA, 21 bp, Homo sapiens
  source 1..21: mol_type = other DNA
aaactgaatagctgtcataaa

SEQ ID NO: 8177 - DNA, 21 bp, Homo sapiens
  source 1..21: mol_type = other DNA
aactgaatagctgtcataaaa

SEQ ID NO: 8178 - DNA, 21 bp, Homo sapiens
  source 1..21: mol_type = other DNA
cataaaatgaaactttctttc

SEQ ID NO: 8179 - DNA, 21 bp, Homo sapiens
  source 1..21: mol_type = other DNA
ataaaatgaaactttctttct

SEQ ID NO: 8180 - DNA, 21 bp, Homo sapiens
  source 1..21: mol_type = other DNA
taaaatgaaactttctttcta

SEQ ID NO: 8181 - DNA, 21 bp, Homo sapiens
  source 1..21: mol_type = other DNA
aaatgaaactttctttctaaa

SEQ ID NO: 8182 - DNA, 21 bp, Homo sapiens
  source 1..21: mol_type = other DNA
gaaactttctttctaaagaaa

SEQ ID NO: 8183 - DNA, 21 bp, Homo sapiens
  source 1..21: mol_type = other DNA
ctcacatgagttcttgaagaa

SEQ ID NO: 8184 - DNA, 21 bp, Homo sapiens
  source 1..21: mol_type = other DNA
gttcttgaagaatagtcataa

SEQ ID NO: 8185 - DNA, 21 bp, Homo sapiens
  source 1..21: mol_type = other DNA
ttcttgaagaatagtcataac

SEQ ID NO: 8186 - DNA, 21 bp, Homo sapiens
  source 1..21: mol_type = other DNA
tcttgaagaatagtcataact

SEQ ID NO: 8187 - DNA, 21 bp, Homo sapiens
  source 1..21: mol_type = other DNA
tgaagaatagtcataactaga

SEQ ID NO: 8188 - DNA, 21 bp, Homo sapiens
  source 1..21: mol_type = other DNA
gaagaatagtcataactagat

SEQ ID NO: 8189 - DNA, 21 bp, Homo sapiens
  source 1..21: mol_type = other DNA
aagaatagtcataactagatt

SEQ ID NO: 8190 - DNA, 21 bp, Homo sapiens
  source 1..21: mol_type = other DNA
agaatagtcataactagatta

SEQ ID NO: 8191 - DNA, 21 bp, Homo sapiens
  source 1..21: mol_type = other DNA
tagtcataactagattaagat

SEQ ID NO: 8192 - DNA, 21 bp, Homo sapiens
  source 1..21: mol_type = other DNA
taactagattaagatctgtgt

SEQ ID NO: 8193 - DNA, 21 bp, Homo sapiens
  source 1..21: mol_type = other DNA
actagattaagatctgtgttt

SEQ ID NO: 8194 - DNA, 21 bp, Homo sapiens
  source 1..21: mol_type = other DNA
ctagattaagatctgtgtttt

SEQ ID NO: 8195 - DNA, 21 bp, Homo sapiens
  source 1..21: mol_type = other DNA
agattaagatctgtgttttag

SEQ ID NO: 8196 - DNA, 21 bp, Homo sapiens
  source 1..21: mol_type = other DNA
gatctgtgttttagtttaata

SEQ ID NO: 8197 - DNA, 21 bp, Homo sapiens
  source 1..21: mol_type = other DNA
atctgtgttttagtttaatag

SEQ ID NO: 8198 - DNA, 21 bp, Homo sapiens
  source 1..21: mol_type = other DNA
ctgtgttttagtttaatagtt

SEQ ID NO: 8199 - DNA, 21 bp, Homo sapiens
  source 1..21: mol_type = other DNA
gtgttttagtttaatagtttg

SEQ ID NO: 8200 - DNA, 21 bp, Homo sapiens
  source 1..21: mol_type = other DNA
tgttttagtttaatagtttga

SEQ ID NO: 8201 - DNA, 21 bp, Homo sapiens
  source 1..21: mol_type = other DNA
ctgtttgggataatgataggt

SEQ ID NO: 8202 - DNA, 21 bp, Homo sapiens
  source 1..21: mol_type = other DNA
gtttgggataatgataggtaa

SEQ ID NO: 8203 - DNA, 21 bp, Homo sapiens
  source 1..21: mol_type = other DNA
tgggataatgataggtaattt

SEQ ID NO: 8204 - DNA, 21 bp, Homo sapiens
  source 1..21: mol_type = other DNA
gggataatgataggtaattta

SEQ ID NO: 8205 - DNA, 21 bp, Homo sapiens
  source 1..21: mol_type = other DNA
ataatgataggtaatttagat

SEQ ID NO: 8206 - DNA, 21 bp, Homo sapiens
  source 1..21: mol_type = other DNA
taatgataggtaatttagatg

SEQ ID NO: 8207 - DNA, 21 bp, Homo sapiens
  source 1..21: mol_type = other DNA
ataggtaatttagatgaattt

SEQ ID NO: 8208 - DNA, 21 bp, Homo sapiens
  source 1..21: mol_type = other DNA
aggtaatttagatgaatttag

SEQ ID NO: 8209 - DNA, 21 bp, Homo sapiens
  source 1..21: mol_type = other DNA
ttagatgaatttaggggaaaa

SEQ ID NO: 8210 - DNA, 21 bp, Homo sapiens
  source 1..21: mol_type = other DNA
tagatgaatttaggggaaaaa

SEQ ID NO: 8211 - DNA, 21 bp, Homo sapiens
  source 1..21: mol_type = other DNA
aggggaaaaaaaagttatctg

SEQ ID NO: 8212 - DNA, 21 bp, Homo sapiens
  source 1..21: mol_type = other DNA
ggggaaaaaaaagttatctgc

SEQ ID NO: 8213 - DNA, 21 bp, Homo sapiens
  source 1..21: mol_type = other DNA
aaaaaaagttatctgcagata

SEQ ID NO: 8214 - DNA, 21 bp, Homo sapiens
  source 1..21: mol_type = other DNA
ctgtcttgtgttttcatgttg

SEQ ID NO: 8215 - DNA, 21 bp, Homo sapiens
  source 1..21: mol_type = other DNA
tgtcttgtgttttcatgttga

SEQ ID NO: 8216 - DNA, 21 bp, Homo sapiens
  source 1..21: mol_type = other DNA
gtcttgtgttttcatgttgaa

SEQ ID NO: 8217 - DNA, 21 bp, Homo sapiens
  source 1..21: mol_type = other DNA
ttcatgttgaaaatacttttg

SEQ ID NO: 8218 - DNA, 21 bp, Homo sapiens
  source 1..21: mol_type = other DNA
tcatgttgaaaatacttttgc

SEQ ID NO: 8219 - DNA, 21 bp, Homo sapiens
  source 1..21: mol_type = other DNA
catgttgaaaatacttttgca

SEQ ID NO: 8220 - DNA, 21 bp, Homo sapiens
  source 1..21: mol_type = other DNA
atgttgaaaatacttttgcat

SEQ ID NO: 8221 - DNA, 21 bp, Homo sapiens
  source 1..21: mol_type = other DNA
tacttttgcatttttcctttg

SEQ ID NO: 8222 - DNA, 21 bp, Homo sapiens
  source 1..21: mol_type = other DNA
tttgagtgccaatttcttact

SEQ ID NO: 8223 - DNA, 21 bp, Homo sapiens
  source 1..21: mol_type = other DNA
gtgccaatttcttactagtac

SEQ ID NO: 8224 - DNA, 21 bp, Homo sapiens
  source 1..21: mol_type = other DNA
tgccaatttcttactagtact

SEQ ID NO: 8225 - DNA, 21 bp, Homo sapiens
  source 1..21: mol_type = other DNA
cttactagtactatttcttaa

SEQ ID NO: 8226 - DNA, 21 bp, Homo sapiens
  source 1..21: mol_type = other DNA
ttactagtactatttcttaat

SEQ ID NO: 8227 - DNA, 21 bp, Homo sapiens
  source 1..21: mol_type = other DNA
agtactatttcttaatgtaac

SEQ ID NO: 8228 - DNA, 21 bp, Homo sapiens
  source 1..21: mol_type = other DNA
gtactatttcttaatgtaaca

SEQ ID NO: 8229 - DNA, 21 bp, Homo sapiens
  source 1..21: mol_type = other DNA
tactatttcttaatgtaacat

SEQ ID NO: 8230 - DNA, 21 bp, Homo sapiens
  source 1..21: mol_type = other DNA
tcttaatgtaacatgtttacc

SEQ ID NO: 8231 - DNA, 21 bp, Homo sapiens
  source 1..21: mol_type = other DNA
tacctggaatgtattttaact

SEQ ID NO: 8232 - DNA, 21 bp, Homo sapiens
  source 1..21: mol_type = other DNA
cctggaatgtattttaactat

SEQ ID NO: 8233 - DNA, 21 bp, Homo sapiens
  source 1..21: mol_type = other DNA
ctggaatgtattttaactatt

SEQ ID NO: 8234 - DNA, 21 bp, Homo sapiens
  source 1..21: mol_type = other DNA
tggaatgtattttaactattt

SEQ ID NO: 8235 - DNA, 21 bp, Homo sapiens
  source 1..21: mol_type = other DNA
ggaatgtattttaactatttt

SEQ ID NO: 8236 - DNA, 21 bp, Homo sapiens
  source 1..21: mol_type = other DNA
aatgtattttaactatttttg

SEQ ID NO: 8237 - DNA, 21 bp, Homo sapiens
  source 1..21: mol_type = other DNA
tgtattttaactatttttgta

SEQ ID NO: 8238 - DNA, 21 bp, Homo sapiens
  source 1..21: mol_type = other DNA
gtattttaactatttttgtat

SEQ ID NO: 8239 - DNA, 21 bp, Homo sapiens
  source 1..21: mol_type = other DNA
tattttaactatttttgtata

SEQ ID NO: 8240 - DNA, 21 bp, Homo sapiens
  source 1..21: mol_type = other DNA
actatttttgtatagtgtaaa

SEQ ID NO: 8241 - DNA, 21 bp, Homo sapiens
  source 1..21: mol_type = other DNA
ctatttttgtatagtgtaaac

SEQ ID NO: 8242 - DNA, 21 bp, Homo sapiens
  source 1..21: mol_type = other DNA
tatttttgtatagtgtaaact

SEQ ID NO: 8243 - DNA, 21 bp, Homo sapiens
  source 1..21: mol_type = other DNA
taaactgaaacatgcacattt

SEQ ID NO: 8244 - DNA, 21 bp, Homo sapiens
  source 1..21: mol_type = other DNA
gaaacatgcacattttgtaca

SEQ ID NO: 8245 - DNA, 21 bp, Homo sapiens
  source 1..21: mol_type = other DNA
gatccagttgttttccatcat

SEQ ID NO: 8246 - DNA, 21 bp, Homo sapiens
  source 1..21: mol_type = other DNA
tccagttgttttccatcattt

SEQ ID NO: 8247 - DNA, 21 bp, Homo sapiens
  source 1..21: mol_type = other DNA
gaatgttggtcatatcaaaca

SEQ ID NO: 8248 - DNA, 21 bp, Homo sapiens
  source 1..21: mol_type = other DNA
aatgttggtcatatcaaacat

SEQ ID NO: 8249 - DNA, 21 bp, Homo sapiens
  source 1..21: mol_type = other DNA
atgttggtcatatcaaacatt

SEQ ID NO: 8250 - DNA, 21 bp, Homo sapiens
  source 1..21: mol_type = other DNA
tggtcatatcaaacattaaaa

SEQ ID NO: 8251 - DNA, 21 bp, Homo sapiens
  source 1..21: mol_type = other DNA
taaaaatgaccactcttttaa

SEQ ID NO: 8252 - DNA, 21 bp, Homo sapiens
  source 1..21: mol_type = other DNA
aaaaatgaccactcttttaat

SEQ ID NO: 8253 - DNA, 21 bp, Homo sapiens
  source 1..21: mol_type = other DNA
cactcttttaattgaaattaa

SEQ ID NO: 8254 - DNA, 21 bp, Homo sapiens
  source 1..21: mol_type = other DNA
actcttttaattgaaattaac

SEQ ID NO: 8255 - DNA, 21 bp, Homo sapiens
  source 1..21: mol_type = other DNA
tcttttaattgaaattaactt

SEQ ID NO: 8256 - DNA, 21 bp, Homo sapiens
  source 1..21: mol_type = other DNA
ttttaattgaaattaactttt

SEQ ID NO: 8257 - DNA, 21 bp, Homo sapiens
  source 1..21: mol_type = other DNA
tttaattgaaattaactttta

SEQ ID NO: 8258 - DNA, 21 bp, Homo sapiens
  source 1..21: mol_type = other DNA
ttaattgaaattaacttttaa

SEQ ID NO: 8259 - DNA, 21 bp, Homo sapiens
  source 1..21: mol_type = other DNA
taattgaaattaacttttaaa

SEQ ID NO: 8260 - DNA, 21 bp, Homo sapiens
  source 1..21: mol_type = other DNA
aattgaaattaacttttaaat

SEQ ID NO: 8261 - DNA, 21 bp, Homo sapiens
  source 1..21: mol_type = other DNA
attgaaattaacttttaaatg

SEQ ID NO: 8262 - DNA, 21 bp, Homo sapiens
  source 1..21: mol_type = other DNA
gaaattaacttttaaatgttt

SEQ ID NO: 8263 - DNA, 21 bp, Homo sapiens
  source 1..21: mol_type = other DNA
ttaacttttaaatgtttatag

SEQ ID NO: 8264 - DNA, 21 bp, Homo sapiens
  source 1..21: mol_type = other DNA
cttttaaatgtttataggagt

SEQ ID NO: 8265 - DNA, 21 bp, Homo sapiens
  source 1..21: mol_type = other DNA
ttttaaatgtttataggagta

SEQ ID NO: 8266 - DNA, 21 bp, Homo sapiens
  source 1..21: mol_type = other DNA
gtgctgtgaagtgatctaaaa

SEQ ID NO: 8267 - DNA, 21 bp, Homo sapiens
  source 1..21: mol_type = other DNA
gctgtgaagtgatctaaaatt

SEQ ID NO: 8268 - DNA, 21 bp, Homo sapiens
  source 1..21: mol_type = other DNA
ctgtgaagtgatctaaaattt

SEQ ID NO: 8269 - DNA, 21 bp, Homo sapiens
  source 1..21: mol_type = other DNA
tgtgaagtgatctaaaatttg

SEQ ID NO: 8270 - DNA, 21 bp, Homo sapiens
  source 1..21: mol_type = other DNA
gtgaagtgatctaaaatttgt

SEQ ID NO: 8271 - DNA, 21 bp, Homo sapiens
  source 1..21: mol_type = other DNA
tgaagtgatctaaaatttgta

SEQ ID NO: 8272 - DNA, 21 bp, Homo sapiens
  source 1..21: mol_type = other DNA
gaagtgatctaaaatttgtaa

SEQ ID NO: 8273 - DNA, 21 bp, Homo sapiens
  source 1..21: mol_type = other DNA
tgatctaaaatttgtaatatt

SEQ ID NO: 8274 - DNA, 21 bp, Homo sapiens
  source 1..21: mol_type = other DNA
gatctaaaatttgtaatattt

SEQ ID NO: 8275 - DNA, 21 bp, Homo sapiens
  source 1..21: mol_type = other DNA
taaaatttgtaatatttttgt

SEQ ID NO: 8276 - DNA, 21 bp, Homo sapiens
  source 1..21: mol_type = other DNA
aaaatttgtaatatttttgtc

SEQ ID NO: 8277 - DNA, 21 bp, Homo sapiens
  source 1..21: mol_type = other DNA
aaatttgtaatatttttgtca

SEQ ID NO: 8278 - DNA, 21 bp, Homo sapiens
  source 1..21: mol_type = other DNA
ttgtaatatttttgtcatgaa

SEQ ID NO: 8279 - DNA, 21 bp, Homo sapiens
  source 1..21: mol_type = other DNA
tgtaatatttttgtcatgaac

SEQ ID NO: 8280 - DNA, 21 bp, Homo sapiens
  source 1..21: mol_type = other DNA
tgaactgtactactcctaatt

SEQ ID NO: 8281 - DNA, 21 bp, Homo sapiens
  source 1..21: mol_type = other DNA
gaactgtactactcctaatta

SEQ ID NO: 8282 - DNA, 21 bp, Homo sapiens
  source 1..21: mol_type = other DNA
actcctaattattgtaatgta

SEQ ID NO: 8283 - DNA, 21 bp, Homo sapiens
  source 1..21: mol_type = other DNA
ctcctaattattgtaatgtaa

SEQ ID NO: 8284 - DNA, 21 bp, Homo sapiens
  source 1..21: mol_type = other DNA
cctaattattgtaatgtaata

SEQ ID NO: 8285 - DNA, 21 bp, Homo sapiens
  source 1..21: mol_type = other DNA
taattattgtaatgtaataaa

SEQ ID NO: 8286 - DNA, 21 bp, Homo sapiens
  source 1..21: mol_type = other DNA
aattattgtaatgtaataaaa

SEQ ID NO: 8287 - DNA, 21 bp, Homo sapiens
  source 1..21: mol_type = other DNA
ttattgtaatgtaataaaaat

SEQ ID NO: 8288 - DNA, 21 bp, Homo sapiens
  source 1..21: mol_type = other DNA
tattgtaatgtaataaaaata

SEQ ID NO: 8289 - DNA, 21 bp, Homo sapiens
  source 1..21: mol_type = other DNA
gtaatgtaataaaaatagtta

SEQ ID NO: 8290 - DNA, 21 bp, Homo sapiens
  source 1..21: mol_type = other DNA
taatgtaataaaaatagttac

SEQ ID NO: 8291 - DNA, 21 bp, Homo sapiens
  source 1..21: mol_type = other DNA
aatgtaataaaaatagttaca

SEQ ID NO: 8292 - DNA, 21 bp, Homo sapiens
  source 1..21: mol_type = other DNA
aaaaatagttacagtgacaaa

SEQ ID NO: 8293 - DNA, 21 bp, Homo sapiens
  source 1..21: mol_type = other DNA
aaaatagttacagtgacaaaa

SEQ ID NO: 8294 - DNA, 21 bp, Homo sapiens
  source 1..21: mol_type = other DNA
aatagttacagtgacaaaaaa

SEQ ID NO: 8295 - DNA, 21 bp, Homo sapiens
  source 1..21: mol_type = other DNA
gagaggcctgctgaaaatgac

SEQ ID NO: 8296 - DNA, 21 bp, Homo sapiens
  source 1..21: mol_type = other DNA
agaggcctgctgaaaatgact

SEQ ID NO: 8297 - DNA, 21 bp, Homo sapiens
  source 1..21: mol_type = other DNA
gaggcctgctgaaaatgactg

SEQ ID NO: 8298 - DNA, 21 bp, Homo sapiens
  source 1..21: mol_type = other DNA
aggcctgctgaaaatgactga

SEQ ID NO: 8299 - DNA, 21 bp, Homo sapiens
  source 1..21: mol_type = other DNA
tagttggagctggtggcgtag

SEQ ID NO: 8300 - DNA, 21 bp, Homo sapiens
  source 1..21: mol_type = other DNA
agttggagctggtggcgtagg

SEQ ID NO: 8301 - DNA, 21 bp, Homo sapiens
  source 1..21: mol_type = other DNA
gttggagctggtggcgtaggc

SEQ ID NO: 8302 - DNA, 21 bp, Homo sapiens
  source 1..21: mol_type = other DNA
ttggagctggtggcgtaggca

SEQ ID NO: 8303 - DNA, 21 bp, Homo sapiens
  source 1..21: mol_type = other DNA
tggagctggtggcgtaggcaa

SEQ ID NO: 8304 - DNA, 21 bp, Homo sapiens
  source 1..21: mol_type = other DNA
ggagctggtggcgtaggcaag

SEQ ID NO: 8305 - DNA, 21 bp, Homo sapiens
  source 1..21: mol_type = other DNA
gagctggtggcgtaggcaaga

SEQ ID NO: 8306 - DNA, 21 bp, Homo sapiens
  source 1..21: mol_type = other DNA
gatacagctaattcagaatca

SEQ ID NO: 8307 - DNA, 21 bp, Homo sapiens
  source 1..21: mol_type = other DNA
agtaattgatggagaaacctg

SEQ ID NO: 8308 - DNA, 21 bp, Homo sapiens
  source 1..21: mol_type = other DNA
gtaattgatggagaaacctgt

SEQ ID NO: 8309 - DNA, 21 bp, Homo sapiens
  source 1..21: mol_type = other DNA
ttgatggagaaacctgtctct

SEQ ID NO: 8310 - DNA, 21 bp, Homo sapiens
  source 1..21: mol_type = other DNA
aacctgtctcttggatattct

SEQ ID NO: 8311 - DNA, 21 bp, Homo sapiens
  source 1..21: mol_type = other DNA
cctgtctcttggatattctcg

SEQ ID NO: 8312 - DNA, 21 bp, Homo sapiens
  source 1..21: mol_type = other DNA
ctgtctcttggatattctcga

SEQ ID NO: 8313 - DNA, 21 bp, Homo sapiens
  source 1..21: mol_type = other DNA
tgtctcttggatattctcgac

SEQ ID NO: 8314 - DNA, 21 bp, Homo sapiens
  source 1..21: mol_type = other DNA
gtctcttggatattctcgaca

SEQ ID NO: 8315 - DNA, 21 bp, Homo sapiens
  source 1..21: mol_type = other DNA
tctcttggatattctcgacac

SEQ ID NO: 8316 - DNA, 21 bp, Homo sapiens
  source 1..21: mol_type = other DNA
ctcttggatattctcgacaca

SEQ ID NO: 8317 - DNA, 21 bp, Homo sapiens
  source 1..21: mol_type = other DNA
tcttggatattctcgacacag

SEQ ID NO: 8318 - DNA, 21 bp, Homo sapiens
  source 1..21: mol_type = other DNA
cacagcaggtcaagaggagta

SEQ ID NO: 8319 - DNA, 21 bp, Homo sapiens
  source 1..21: mol_type = other DNA
acagcaggtcaagaggagtac

SEQ ID NO: 8320 - DNA, 21 bp, Homo sapiens
  source 1..21: mol_type = other DNA
cagcaggtcaagaggagtaca

SEQ ID NO: 8321 - DNA, 21 bp, Homo sapiens
  source 1..21: mol_type = other DNA
agaggagtacagtgcaatgag

SEQ ID NO: 8322 - DNA, 21 bp, Homo sapiens
  source 1..21: mol_type = other DNA
gaggagtacagtgcaatgagg

SEQ ID NO: 8323 - DNA, 21 bp, Homo sapiens
  source 1..21: mol_type = other DNA
aggagtacagtgcaatgaggg

SEQ ID NO: 8324 - DNA, 21 bp, Homo sapiens
  source 1..21: mol_type = other DNA
ggagtacagtgcaatgaggga

SEQ ID NO: 8325 - DNA, 21 bp, Homo sapiens
  source 1..21: mol_type = other DNA
gagtacagtgcaatgagggac

SEQ ID NO: 8326 - DNA, 21 bp, Homo sapiens
  source 1..21: mol_type = other DNA
agtacagtgcaatgagggacc

SEQ ID NO: 8327 - DNA, 21 bp, Homo sapiens
  source 1..21: mol_type = other DNA
gtacagtgcaatgagggacca

SEQ ID NO: 8328 - DNA, 21 bp, Homo sapiens
  source 1..21: mol_type = other DNA
tacagtgcaatgagggaccag

SEQ ID NO: 8329 - DNA, 21 bp, Homo sapiens
  source 1..21: mol_type = other DNA
acagtgcaatgagggaccagt

SEQ ID NO: 8330 - DNA, 21 bp, Homo sapiens
  source 1..21: mol_type = other DNA
gtgtatttgccataaataata

SEQ ID NO: 8331 - DNA, 21 bp, Homo sapiens
  source 1..21: mol_type = other DNA
tgtatttgccataaataatac

SEQ ID NO: 8332 - DNA, 21 bp, Homo sapiens
  source 1..21: mol_type = other DNA
gtatttgccataaataatact

SEQ ID NO: 8333 - DNA, 21 bp, Homo sapiens
  source 1..21: mol_type = other DNA
tatttgccataaataatacta

SEQ ID NO: 8334 - DNA, 21 bp, Homo sapiens
  source 1..21: mol_type = other DNA
atttgccataaataatactaa

SEQ ID NO: 8335 - DNA, 21 bp, Homo sapiens
  source 1..21: mol_type = other DNA
tttgccataaataatactaaa

SEQ ID NO: 8336 - DNA, 21 bp, Homo sapiens
  source 1..21: mol_type = other DNA
ttgccataaataatactaaat

SEQ ID NO: 8337 - DNA, 21 bp, Homo sapiens
  source 1..21: mol_type = other DNA
taatactaaatcatttgaaga

SEQ ID NO: 8338 - DNA, 21 bp, Homo sapiens
  source 1..21: mol_type = other DNA
aatactaaatcatttgaagat

SEQ ID NO: 8339 - DNA, 21 bp, Homo sapiens
  source 1..21: mol_type = other DNA
atactaaatcatttgaagata

SEQ ID NO: 8340 - DNA, 21 bp, Homo sapiens
  source 1..21: mol_type = other DNA
tactaaatcatttgaagatat

SEQ ID NO: 8341 - DNA, 21 bp, Homo sapiens
  source 1..21: mol_type = other DNA
actaaatcatttgaagatatt

SEQ ID NO: 8342 - DNA, 21 bp, Homo sapiens
  source 1..21: mol_type = other DNA
ctaaatcatttgaagatattc

SEQ ID NO: 8343 - DNA, 21 bp, Homo sapiens
  source 1..21: mol_type = other DNA
taaatcatttgaagatattca

SEQ ID NO: 8344 - DNA, 21 bp, Homo sapiens
  source 1..21: mol_type = other DNA
aaatcatttgaagatattcac

SEQ ID NO: 8345 - DNA, 21 bp, Homo sapiens
  source 1..21: mol_type = other DNA
aatcatttgaagatattcacc

SEQ ID NO: 8346 - DNA, 21 bp, Homo sapiens
  source 1..21: mol_type = other DNA
agatattcaccattatagaga

SEQ ID NO: 8347 - DNA, 21 bp, Homo sapiens
  source 1..21: mol_type = other DNA
gatattcaccattatagagaa

SEQ ID NO: 8348 - DNA, 21 bp, Homo sapiens
  source 1..21: mol_type = other DNA
atattcaccattatagagaac

SEQ ID NO: 8349 - DNA, 21 bp, Homo sapiens
  source 1..21: mol_type = other DNA
tattcaccattatagagaaca

SEQ ID NO: 8350 - DNA, 21 bp, Homo sapiens
  source 1..21: mol_type = other DNA
attcaccattatagagaacaa

SEQ ID NO: 8351 - DNA, 21 bp, Homo sapiens
  source 1..21: mol_type = other DNA
ttcaccattatagagaacaaa

SEQ ID NO: 8352 - DNA, 21 bp, Homo sapiens
  source 1..21: mol_type = other DNA
tcaccattatagagaacaaat

SEQ ID NO: 8353 - DNA, 21 bp, Homo sapiens
  source 1..21: mol_type = other DNA
caccattatagagaacaaatt

SEQ ID NO: 8354 - DNA, 21 bp, Homo sapiens
  source 1..21: mol_type = other DNA
accattatagagaacaaatta

SEQ ID NO: 8355 - DNA, 21 bp, Homo sapiens
  source 1..21: mol_type = other DNA
acctatggtcctagtaggaaa

SEQ ID NO: 8356 - DNA, 21 bp, Homo sapiens
  source 1..21: mol_type = other DNA
aatgtgatttgccttctagaa

SEQ ID NO: 8357 - DNA, 21 bp, Homo sapiens
  source 1..21: mol_type = other DNA
atgtgatttgccttctagaac

SEQ ID NO: 8358 - DNA, 21 bp, Homo sapiens
  source 1..21: mol_type = other DNA
gtgatttgccttctagaacag

SEQ ID NO: 8359 - DNA, 21 bp, Homo sapiens
  source 1..21: mol_type = other DNA
aagttatggaattccttttat

SEQ ID NO: 8360 - DNA, 21 bp, Homo sapiens
  source 1..21: mol_type = other DNA
agttatggaattccttttatt

SEQ ID NO: 8361 - DNA, 21 bp, Homo sapiens
  source 1..21: mol_type = other DNA
gttatggaattccttttattg

SEQ ID NO: 8362 - DNA, 21 bp, Homo sapiens
  source 1..21: mol_type = other DNA
atgatgccttctatacattag

SEQ ID NO: 8363 - DNA, 21 bp, Homo sapiens
  source 1..21: mol_type = other DNA
tgatgccttctatacattagt

SEQ ID NO: 8364 - DNA, 21 bp, Homo sapiens
  source 1..21: mol_type = other DNA
ttcgagaaattcgaaaacata

SEQ ID NO: 8365 - DNA, 21 bp, Homo sapiens
  source 1..21: mol_type = other DNA
tcgaaaacataaagaaaagat

SEQ ID NO: 8366 - DNA, 21 bp, Homo sapiens
  source 1..21: mol_type = other DNA
cgaaaacataaagaaaagatg

SEQ ID NO: 8367 - DNA, 21 bp, Homo sapiens
  source 1..21: mol_type = other DNA
gaaaacataaagaaaagatga

SEQ ID NO: 8368 - DNA, 21 bp, Homo sapiens
  source 1..21: mol_type = other DNA
aaaacataaagaaaagatgag

SEQ ID NO: 8369 - DNA, 21 bp, Homo sapiens
  source 1..21: mol_type = other DNA
aaacataaagaaaagatgagc

SEQ ID NO: 8370 - DNA, 21 bp, Homo sapiens
  source 1..21: mol_type = other DNA
aacataaagaaaagatgagca

SEQ ID NO: 8371 - DNA, 21 bp, Homo sapiens
  source 1..21: mol_type = other DNA
acataaagaaaagatgagcaa

SEQ ID NO: 8372 - DNA, 21 bp, Homo sapiens
  source 1..21: mol_type = other DNA
cataaagaaaagatgagcaaa

SEQ ID NO: 8373 - DNA, 21 bp, Homo sapiens
  source 1..21: mol_type = other DNA
ataaagaaaagatgagcaaag

SEQ ID NO: 8374 - DNA, 21 bp, Homo sapiens
  source 1..21: mol_type = other DNA
acaagtggtaatttttgtaca

SEQ ID NO: 8375 - DNA, 21 bp, Homo sapiens
  source 1..21: mol_type = other DNA
caagtggtaatttttgtacat

SEQ ID NO: 8376 - DNA, 21 bp, Homo sapiens
  source 1..21: mol_type = other DNA
ttttgtacattacactaaatt

SEQ ID NO: 8377 - DNA, 21 bp, Homo sapiens
  source 1..21: mol_type = other DNA
tttgtacattacactaaatta

SEQ ID NO: 8378 - DNA, 21 bp, Homo sapiens
  source 1..21: mol_type = other DNA
ttgtacattacactaaattat

SEQ ID NO: 8379 - DNA, 21 bp, Homo sapiens
  source 1..21: mol_type = other DNA
tgtacattacactaaattatt

SEQ ID NO: 8380 - DNA, 21 bp, Homo sapiens
  source 1..21: mol_type = other DNA
gtacattacactaaattatta

SEQ ID NO: 8381 - DNA, 21 bp, Homo sapiens
  source 1..21: mol_type = other DNA
tacattacactaaattattag

SEQ ID NO: 8382 - DNA, 21 bp, Homo sapiens
  source 1..21: mol_type = other DNA
acattacactaaattattagc

SEQ ID NO: 8383 - DNA, 21 bp, Homo sapiens
  source 1..21: mol_type = other DNA
cattacactaaattattagca

SEQ ID NO: 8384 - DNA, 21 bp, Homo sapiens
  source 1..21: mol_type = other DNA
attacactaaattattagcat

SEQ ID NO: 8385 - DNA, 21 bp, Homo sapiens
  source 1..21: mol_type = other DNA
attattagcatttgttttagc

SEQ ID NO: 8386 - DNA, 21 bp, Homo sapiens
  source 1..21: mol_type = other DNA
ttattagcatttgttttagca

SEQ ID NO: 8387 - DNA, 21 bp, Homo sapiens
  source 1..21: mol_type = other DNA
tattagcatttgttttagcat

SEQ ID NO: 8388 - DNA, 21 bp, Homo sapiens
  source 1..21: mol_type = other DNA
attagcatttgttttagcatt

SEQ ID NO: 8389 - DNA, 21 bp, Homo sapiens
  source 1..21: mol_type = other DNA
ttagcatttgttttagcatta

SEQ ID NO: 8390 - DNA, 21 bp, Homo sapiens
  source 1..21: mol_type = other DNA
tagcatttgttttagcattac

SEQ ID NO: 8391 - DNA, 21 bp, Homo sapiens
  source 1..21: mol_type = other DNA
agcatttgttttagcattacc

SEQ ID NO: 8392 - DNA, 21 bp, Homo sapiens
  source 1..21: mol_type = other DNA
gcatttgttttagcattacct

SEQ ID NO: 8393 - DNA, 21 bp, Homo sapiens
  source 1..21: mol_type = other DNA
catttgttttagcattaccta

SEQ ID NO: 8394 - DNA, 21 bp, Homo sapiens
  source 1..21: mol_type = other DNA
tgcttattttaaaatgacagt

SEQ ID NO: 8395 - DNA, 21 bp, Homo sapiens
  source 1..21: mol_type = other DNA
cttattttaaaatgacagtgg

SEQ ID NO: 8396 - DNA, 21 bp, Homo sapiens
  source 1..21: mol_type = other DNA
cctctaagtgccagtattccc

SEQ ID NO: 8397 - DNA, 21 bp, Homo sapiens
  source 1..21: mol_type = other DNA
aacaaattaatgaagcttttg

SEQ ID NO: 8398 - DNA, 21 bp, Homo sapiens
  source 1..21: mol_type = other DNA
acaaattaatgaagcttttga

SEQ ID NO: 8399 - DNA, 21 bp, Homo sapiens
  source 1..21: mol_type = other DNA
tctgtgttttatctagtcaca

SEQ ID NO: 8400 - DNA, 21 bp, Homo sapiens
  source 1..21: mol_type = other DNA
ctgtgttttatctagtcacat

SEQ ID NO: 8401 - DNA, 21 bp, Homo sapiens
  source 1..21: mol_type = other DNA
tgttttatctagtcacataaa

SEQ ID NO: 8402 - DNA, 21 bp, Homo sapiens
  source 1..21: mol_type = other DNA
cataaatggattaattactaa

SEQ ID NO: 8403 - DNA, 21 bp, Homo sapiens
  source 1..21: mol_type = other DNA
ataaatggattaattactaat

SEQ ID NO: 8404 - DNA, 21 bp, Homo sapiens
  source 1..21: mol_type = other DNA
taattggtttttactgaaaca

SEQ ID NO: 8405 - DNA, 21 bp, Homo sapiens
  source 1..21: mol_type = other DNA
gccatttccttttcacattag

SEQ ID NO: 8406 - DNA, 21 bp, Homo sapiens
  source 1..21: mol_type = other DNA
tccttttcacattagataaat

SEQ ID NO: 8407 - DNA, 21 bp, Homo sapiens
  source 1..21: mol_type = other DNA
cacattagataaattactata

SEQ ID NO: 8408 - DNA, 21 bp, Homo sapiens
  source 1..21: mol_type = other DNA
acattagataaattactataa

SEQ ID NO: 8409 - DNA, 21 bp, Homo sapiens
  source 1..21: mol_type = other DNA
cattagataaattactataaa

SEQ ID NO: 8410 - DNA, 21 bp, Homo sapiens
  source 1..21: mol_type = other DNA
gttaaggcagacccagtatga

SEQ ID NO: 8411 - DNA, 21 bp, Homo sapiens
  source 1..21: mol_type = other DNA
ttaaggcagacccagtatgaa

SEQ ID NO: 8412 - DNA, 21 bp, Homo sapiens
  source 1..21: mol_type = other DNA
taaggcagacccagtatgaaa

SEQ ID NO: 8413 - DNA, 21 bp, Homo sapiens
  source 1..21: mol_type = other DNA
aaggcagacccagtatgaaat

SEQ ID NO: 8414 - DNA, 21 bp, Homo sapiens
  source 1..21: mol_type = other DNA
agtatgaaatggggattatta

SEQ ID NO: 8415 - DNA, 21 bp, Homo sapiens
  source 1..21: mol_type = other DNA
tggggattattatagcaacca

SEQ ID NO: 8416 - DNA, 21 bp, Homo sapiens
  source 1..21: mol_type = other DNA
tggggctatatttacatgcta

SEQ ID NO: 8417 - DNA, 21 bp, Homo sapiens
  source 1..21: mol_type = other DNA
ggggctatatttacatgctac

SEQ ID NO: 8418 - DNA, 21 bp, Homo sapiens
  source 1..21: mol_type = other DNA
gggctatatttacatgctact

SEQ ID NO: 8419 - DNA, 21 bp, Homo sapiens
  source 1..21: mol_type = other DNA
ggctatatttacatgctacta

SEQ ID NO: 8420 - DNA, 21 bp, Homo sapiens
  source 1..21: mol_type = other DNA
gctatatttacatgctactaa

SEQ ID NO: 8421 - DNA, 21 bp, Homo sapiens
  source 1..21: mol_type = other DNA
ctatatttacatgctactaaa

SEQ ID NO: 8422 - DNA, 21 bp, Homo sapiens
  source 1..21: mol_type = other DNA
tatatttacatgctactaaat

SEQ ID NO: 8423 - DNA, 21 bp, Homo sapiens
  source 1..21: mol_type = other DNA
atatttacatgctactaaatt

SEQ ID NO: 8424 - DNA, 21 bp, Homo sapiens
  source 1..21: mol_type = other DNA
tatttacatgctactaaattt

SEQ ID NO: 8425 - DNA, 21 bp, Homo sapiens
  source 1..21: mol_type = other DNA
atttacatgctactaaatttt

SEQ ID NO: 8426 - DNA, 21 bp, Homo sapiens
  source 1..21: mol_type = other DNA
tttacatgctactaaattttt

SEQ ID NO: 8427 - DNA, 21 bp, Homo sapiens
  source 1..21: mol_type = other DNA
ctctttcatagtataacttta

SEQ ID NO: 8428 - DNA, 21 bp, Homo sapiens
  source 1..21: mol_type = other DNA
tcatagtataactttaaatct

SEQ ID NO: 8429 - DNA, 21 bp, Homo sapiens
  source 1..21: mol_type = other DNA
catagtataactttaaatctt

SEQ ID NO: 8430 - DNA, 21 bp, Homo sapiens
  source 1..21: mol_type = other DNA
tttaaatcttttcttcaactt

SEQ ID NO: 8431 - DNA, 21 bp, Homo sapiens
  source 1..21: mol_type = other DNA
ttaaatcttttcttcaacttg

SEQ ID NO: 8432 - DNA, 21 bp, Homo sapiens
  source 1..21: mol_type = other DNA
aacttgagtctttgaagatag

SEQ ID NO: 8433 - DNA, 21 bp, Homo sapiens
  source 1..21: mol_type = other DNA
cttgagtctttgaagatagtt

SEQ ID NO: 8434 - DNA, 21 bp, Homo sapiens
  source 1..21: mol_type = other DNA
ttgagtctttgaagatagttt

SEQ ID NO: 8435 - DNA, 21 bp, Homo sapiens
  source 1..21: mol_type = other DNA
aagatagttttaattctgctt

SEQ ID NO: 8436 - DNA, 21 bp, Homo sapiens
  source 1..21: mol_type = other DNA
agatagttttaattctgcttg

SEQ ID NO: 8437 - DNA, 21 bp, Homo sapiens
  source 1..21: mol_type = other DNA
gatagttttaattctgcttgt

SEQ ID NO: 8438 - DNA, 21 bp, Homo sapiens
  source 1..21: mol_type = other DNA
tgcttgtgacattaaaagatt

SEQ ID NO: 8439 - DNA, 21 bp, Homo sapiens
  source 1..21: mol_type = other DNA
aatattaactcaaaagttgag

SEQ ID NO: 8440 - DNA, 21 bp, Homo sapiens
  source 1..21: mol_type = other DNA
ggtgtgccaagacattaattt

SEQ ID NO: 8441 - DNA, 21 bp, Homo sapiens
  source 1..21: mol_type = other DNA
actggttaaattaacattgca

SEQ ID NO: 8442 - DNA, 21 bp, Homo sapiens
  source 1..21: mol_type = other DNA
ctggttaaattaacattgcat

SEQ ID NO: 8443 - DNA, 21 bp, Homo sapiens
  source 1..21: mol_type = other DNA
tggttaaattaacattgcata

SEQ ID NO: 8444 - DNA, 21 bp, Homo sapiens
  source 1..21: mol_type = other DNA
acattgcataaacacttttca

SEQ ID NO: 8445 - DNA, 21 bp, Homo sapiens
  source 1..21: mol_type = other DNA
tcaagtctgatccatatttaa

SEQ ID NO: 8446 - DNA, 21 bp, Homo sapiens
  source 1..21: mol_type = other DNA
tttaaaataaatgaagtgaga

SEQ ID NO: 8447 - DNA, 21 bp, Homo sapiens
  source 1..21: mol_type = other DNA
ttaaaataaatgaagtgagat

SEQ ID NO: 8448 - DNA, 21 bp, Homo sapiens
  source 1..21: mol_type = other DNA
tcaagctcagcacaatctgta

SEQ ID NO: 8449 - DNA, 21 bp, Homo sapiens
  source 1..21: mol_type = other DNA
caagctcagcacaatctgtaa

SEQ ID NO: 8450 - DNA, 21 bp, Homo sapiens
  source 1..21: mol_type = other DNA
gcataactgtgattcttttag

SEQ ID NO: 8451 - DNA, 21 bp, Homo sapiens
  source 1..21: mol_type = other DNA
actgtgattcttttaggacaa

SEQ ID NO: 8452 - DNA, 21 bp, Homo sapiens
  source 1..21: mol_type = other DNA
ctgtgattcttttaggacaat

SEQ ID NO: 8453 - DNA, 21 bp, Homo sapiens
  source 1..21: mol_type = other DNA
ggtgtatgtcagatattcata

SEQ ID NO: 8454 - DNA, 21 bp, Homo sapiens
  source 1..21: mol_type = other DNA
gtgtatgtcagatattcatat

SEQ ID NO: 8455 - DNA, 21 bp, Homo sapiens
  source 1..21: mol_type = other DNA
caaatgtgtaatattccagtt

SEQ ID NO: 8456 - DNA, 21 bp, Homo sapiens
  source 1..21: mol_type = other DNA
cacactgcataggaatttaga

SEQ ID NO: 8457 - DNA, 21 bp, Homo sapiens
  source 1..21: mol_type = other DNA
gtcaccattgcacaattttgt

SEQ ID NO: 8458 - DNA, 21 bp, Homo sapiens
  source 1..21: mol_type = other DNA
tcaccattgcacaattttgtc

SEQ ID NO: 8459 - DNA, 21 bp, Homo sapiens
  source 1..21: mol_type = other DNA
caccattgcacaattttgtcc

SEQ ID NO: 8460 - DNA, 21 bp, Homo sapiens
  source 1..21: mol_type = other DNA
accattgcacaattttgtcct

SEQ ID NO: 8461 - DNA, 21 bp, Homo sapiens
  source 1..21: mol_type = other DNA
ccattgcacaattttgtccta

SEQ ID NO: 8462 - DNA, 21 bp, Homo sapiens
  source 1..21: mol_type = other DNA
cattgcacaattttgtcctaa

SEQ ID NO: 8463 - DNA, 21 bp, Homo sapiens
  source 1..21: mol_type = other DNA
gatagcatgaattctgcattg

SEQ ID NO: 8464 - DNA, 21 bp, Homo sapiens
  source 1..21: mol_type = other DNA
atagcatgaattctgcattga

SEQ ID NO: 8465 - DNA, 21 bp, Homo sapiens
  source 1..21: mol_type = other DNA
agtttgaagtgcctgtttggg

SEQ ID NO: 8466 - DNA, 21 bp, Homo sapiens
  source 1..21: mol_type = other DNA
gtttgaagtgcctgtttggga

SEQ ID NO: 8467 - DNA, 21 bp, Homo sapiens
  source 1..21: mol_type = other DNA
tttgaagtgcctgtttgggat

SEQ ID NO: 8468 - DNA, 21 bp, Homo sapiens
  source 1..21: mol_type = other DNA
cctttgagtgccaatttctta

SEQ ID NO: 8469 - DNA, 21 bp, Homo sapiens
  source 1..21: mol_type = other DNA
ctttgagtgccaatttcttac

SEQ ID NO: 8470 - DNA, 21 bp, Homo sapiens
  source 1..21: mol_type = other DNA
tttgagtgccaatttcttact

SEQ ID NO: 8471 - DNA, 21 bp, Homo sapiens
  source 1..21: mol_type = other DNA
ttgagtgccaatttcttacta

SEQ ID NO: 8472 - DNA, 21 bp, Homo sapiens
  source 1..21: mol_type = other DNA
tgagtgccaatttcttactag

SEQ ID NO: 8473 - DNA, 21 bp, Homo sapiens
  source 1..21: mol_type = other DNA
gagtgccaatttcttactagt

SEQ ID NO: 8474 - DNA, 21 bp, Homo sapiens
  source 1..21: mol_type = other DNA
gaatgtattttaactattttt

SEQ ID NO: 8475 - DNA, 21 bp, Homo sapiens
  source 1..21: mol_type = other DNA
aatgtattttaactatttttg

SEQ ID NO: 8476 - DNA, 21 bp, Homo sapiens
  source 1..21: mol_type = other DNA
taactatttttgtatagtgta

SEQ ID NO: 8477 - DNA, 21 bp, Homo sapiens
  source 1..21: mol_type = other DNA
aactatttttgtatagtgtaa

SEQ ID NO: 8478 - DNA, 21 bp, Homo sapiens
  source 1..21: mol_type = other DNA
actatttttgtatagtgtaaa

SEQ ID NO: 8479 - DNA, 21 bp, Homo sapiens
  source 1..21: mol_type = other DNA
ctatttttgtatagtgtaaac

SEQ ID NO: 8480 - DNA, 21 bp, Homo sapiens
  source 1..21: mol_type = other DNA
tatttttgtatagtgtaaact

SEQ ID NO: 8481 - DNA, 21 bp, Homo sapiens
  source 1..21: mol_type = other DNA
atttttgtatagtgtaaactg

SEQ ID NO: 8482 - DNA, 21 bp, Homo sapiens
  source 1..21: mol_type = other DNA
gaaacatgcacattttgtaca

SEQ ID NO: 8483 - DNA, 21 bp, Homo sapiens
  source 1..21: mol_type = other DNA
aaacatgcacattttgtacat

SEQ ID NO: 8484 - DNA, 21 bp, Homo sapiens
  source 1..21: mol_type = other DNA
catgcacattttgtacattgt

SEQ ID NO: 8485 - DNA, 21 bp, Homo sapiens
  source 1..21: mol_type = other DNA
atgcacattttgtacattgtg

SEQ ID NO: 8486 - DNA, 21 bp, Homo sapiens
  source 1..21: mol_type = other DNA
tgcacattttgtacattgtgc

SEQ ID NO: 8487 - DNA, 21 bp, Homo sapiens
  source 1..21: mol_type = other DNA
gcacattttgtacattgtgct

SEQ ID NO: 8488 - DNA, 21 bp, Homo sapiens
  source 1..21: mol_type = other DNA
cacattttgtacattgtgctt

SEQ ID NO: 8489 - DNA, 21 bp, Homo sapiens
  source 1..21: mol_type = other DNA
acattttgtacattgtgcttt

SEQ ID NO: 8490 - DNA, 21 bp, Homo sapiens
  source 1..21: mol_type = other DNA
cattttgtacattgtgctttc

SEQ ID NO: 8491 - DNA, 21 bp, Homo sapiens
  source 1..21: mol_type = other DNA
tgtgggacatatgcagtgtga

SEQ ID NO: 8492 - DNA, 21 bp, Homo sapiens
  source 1..21: mol_type = other DNA
gtgggacatatgcagtgtgat

SEQ ID NO: 8493 - DNA, 21 bp, Homo sapiens
  source 1..21: mol_type = other DNA
tgggacatatgcagtgtgatc

SEQ ID NO: 8494 - DNA, 21 bp, Homo sapiens
  source 1..21: mol_type = other DNA
gggacatatgcagtgtgatcc

SEQ ID NO: 8495 - DNA, 21 bp, Homo sapiens
  source 1..21: mol_type = other DNA
ggacatatgcagtgtgatcca

SEQ ID NO: 8496 - DNA, 21 bp, Homo sapiens
  source 1..21: mol_type = other DNA
gacatatgcagtgtgatccag

SEQ ID NO: 8497 - DNA, 21 bp, Homo sapiens
  source 1..21: mol_type = other DNA
acatatgcagtgtgatccagt

SEQ ID NO: 8498 - DNA, 21 bp, Homo sapiens
  source 1..21: mol_type = other DNA
catatgcagtgtgatccagtt

SEQ ID NO: 8499 - DNA, 21 bp, Homo sapiens
  source 1..21: mol_type = other DNA
atatgcagtgtgatccagttg

SEQ ID NO: 8500 - DNA, 21 bp, Homo sapiens
  source 1..21: mol_type = other DNA
gcagtgtgatccagttgtttt

SEQ ID NO: 8501 - DNA, 21 bp, Homo sapiens
  source 1..21: mol_type = other DNA
cagtgtgatccagttgttttc

SEQ ID NO: 8502 - DNA, 21 bp, Homo sapiens
  source 1..21: mol_type = other DNA
agtgtgatccagttgttttcc

SEQ ID NO: 8503 - DNA, 21 bp, Homo sapiens
  source 1..21: mol_type = other DNA
gtgtgatccagttgttttcca

SEQ ID NO: 8504 - DNA, 21 bp, Homo sapiens
  source 1..21: mol_type = other DNA
tgtgatccagttgttttccat

SEQ ID NO: 8505 - DNA, 21 bp, Homo sapiens
  source 1..21: mol_type = other DNA
gtgatccagttgttttccatc

SEQ ID NO: 8506 - DNA, 21 bp, Homo sapiens
  source 1..21: mol_type = other DNA
catttggttgcgctgacctag

SEQ ID NO: 8507 - DNA, 21 bp, Homo sapiens
  source 1..21: mol_type = other DNA
atttggttgcgctgacctagg

SEQ ID NO: 8508 - DNA, 21 bp, Homo sapiens
  source 1..21: mol_type = other DNA
taggaatgttggtcatatcaa

SEQ ID NO: 8509 - DNA, 21 bp, Homo sapiens
  source 1..21: mol_type = other DNA
aggaatgttggtcatatcaaa

SEQ ID NO: 8510 - DNA, 21 bp, Homo sapiens
  source 1..21: mol_type = other DNA
ggaatgttggtcatatcaaac

SEQ ID NO: 8511 - DNA, 21 bp, Homo sapiens
  source 1..21: mol_type = other DNA
gaatgttggtcatatcaaaca

SEQ ID NO: 8512 - DNA, 21 bp, Homo sapiens
  source 1..21: mol_type = other DNA
aatgttggtcatatcaaacat

SEQ ID NO: 8513 - DNA, 21 bp, Homo sapiens
  source 1..21: mol_type = other DNA
atgttggtcatatcaaacatt

SEQ ID NO: 8514 - DNA, 21 bp, Homo sapiens
  source 1..21: mol_type = other DNA
tgttggtcatatcaaacatta

SEQ ID NO: 8515 - DNA, 21 bp, Homo sapiens
  source 1..21: mol_type = other DNA
gttggtcatatcaaacattaa

SEQ ID NO: 8516 - DNA, 21 bp, Homo sapiens
  source 1..21: mol_type = other DNA
ttggtcatatcaaacattaaa

SEQ ID NO: 8517 - DNA, 21 bp, Homo sapiens
  source 1..21: mol_type = other DNA
tgaaattaacttttaaatgtt

SEQ ID NO: 8518 - DNA, 21 bp, Homo sapiens
  source 1..21: mol_type = other DNA
gaaattaacttttaaatgttt

SEQ ID NO: 8519 - DNA, 21 bp, Homo sapiens
  source 1..21: mol_type = other DNA
ttaacttttaaatgtttatag

SEQ ID NO: 8520 - DNA, 21 bp, Homo sapiens
  source 1..21: mol_type = other DNA
taacttttaaatgtttatagg

SEQ ID NO: 8521 - DNA, 21 bp, Homo sapiens
  source 1..21: mol_type = other DNA
aacttttaaatgtttatagga

SEQ ID NO: 8522 - DNA, 21 bp, Homo sapiens
  source 1..21: mol_type = other DNA
acttttaaatgtttataggag

SEQ ID NO: 8523 - DNA, 21 bp, Homo sapiens
  source 1..21: mol_type = other DNA
cttttaaatgtttataggagt

SEQ ID NO: 8524 - DNA, 21 bp, Homo sapiens
  source 1..21: mol_type = other DNA
ttttaaatgtttataggagta

SEQ ID NO: 8525 - DNA, 21 bp, Homo sapiens
  source 1..21: mol_type = other DNA
taaaatttgtaatatttttgt

SEQ ID NO: 8526 - DNA, 21 bp, Homo sapiens
  source 1..21: mol_type = other DNA
aaaatttgtaatatttttgtc

SEQ ID NO: 8527 - DNA, 21 bp, Homo sapiens
  source 1..21: mol_type = other DNA
aaatttgtaatatttttgtca

SEQ ID NO: 8528 - DNA, 21 bp, Homo sapiens
  source 1..21: mol_type = other DNA
aatttgtaatatttttgtcat

SEQ ID NO: 8529 - DNA, 21 bp, Homo sapiens
  source 1..21: mol_type = other DNA
atttgtaatatttttgtcatg

SEQ ID NO: 8530 - DNA, 21 bp, Homo sapiens
  source 1..21: mol_type = other DNA
tttgtaatatttttgtcatga

SEQ ID NO: 8531 - DNA, 21 bp, Homo sapiens
  source 1..21: mol_type = other DNA
ttgtaatatttttgtcatgaa

SEQ ID NO: 8532 - DNA, 21 bp, Homo sapiens
  source 1..21: mol_type = other DNA
tgtaatatttttgtcatgaac

SEQ ID NO: 8533 - DNA, 21 bp, Homo sapiens
  source 1..21: mol_type = other DNA
ttattgtaatgtaataaaaat

SEQ ID NO: 8534 - DNA, 21 bp, Homo sapiens
  source 1..21: mol_type = other DNA
tattgtaatgtaataaaaata

SEQ ID NO: 8535 - DNA, 21 bp, Homo sapiens
  source 1..21: mol_type = other DNA
attgtaatgtaataaaaatag

SEQ ID NO: 8536 - DNA, 21 bp, Homo sapiens
  source 1..21: mol_type = other DNA
ttgtaatgtaataaaaatagt

SEQ ID NO: 8537 - DNA, 21 bp, Homo sapiens
  source 1..21: mol_type = other DNA
tgtaatgtaataaaaatagtt

SEQ ID NO: 8538 - RNA, 21 nt, synthetic construct
  misc_feature 1..21: note = Description of Artificial Sequence: Syntheticoligonucleotide
  source 1..21: mol_type = other RNA
caggtcaagaggagtacagtg

SEQ ID NO: 8539 - RNA, 21 nt, synthetic construct
  misc_feature 1..21: note = Description of Artificial Sequence: Syntheticoligonucleotide
  source 1..21: mol_type = other RNA
ctgtactcctcttgacctgct

SEQ ID NO: 8540 - RNA, 21 nt, synthetic construct
  misc_feature 1..21: note = Description of Artificial Sequence: Syntheticoligonucleotide
  source 1..21: mol_type = other RNA
agcaggtcaagaggagtacag

SEQ ID NO: 8541 - RNA, 21 nt, synthetic construct
  misc_feature 1..21: note = Description of Artificial Sequence: Syntheticoligonucleotide
  source 1..21: mol_type = other RNA
ctgtactcctcttgacctgct

SEQ ID NO: 8542 - RNA, 21 nt, synthetic construct
  misc_feature 1..21: note = Description of Artificial Sequence: Syntheticoligonucleotide
  source 1..21: mol_type = other RNA
agcaggtcaagaggagtacta

SEQ ID NO: 8543 - RNA, 21 nt, synthetic construct
  misc_feature 1..21: note = Description of Artificial Sequence: Syntheticoligonucleotide
  source 1..21: mol_type = other RNA
ttagcatttgttttagcatta

SEQ ID NO: 8544 - RNA, 21 nt, synthetic construct
  misc_feature 1..21: note = Description of Artificial Sequence: Syntheticoligonucleotide
  source 1..21: mol_type = other RNA
atgctaaaacaaatgctaata

SEQ ID NO: 8545 - RNA, 21 nt, synthetic construct
  misc_feature 1..21: note = Description of Artificial Sequence: Syntheticoligonucleotide
  source 1..21: mol_type = other RNA
tattagcatttgttttagcat

SEQ ID NO: 8546 - RNA, 21 nt, synthetic construct
  misc_feature 1..21: note = Description of Artificial Sequence: Syntheticoligonucleotide
  source 1..21: mol_type = other RNA
atgctaaaacaaatgctaata

SEQ ID NO: 8547 - RNA, 27 nt, synthetic construct
  misc_feature 1..27: note = Description of Artificial Sequence: Syntheticoligonucleotide
  source 1..27: mol_type = other RNA
tattagcatttgttttagcattacccc

SEQ ID NO: 8548 - RNA, 21 nt, synthetic construct
  misc_feature 1..21: note = Description of Artificial Sequence: Syntheticoligonucleotide
  source 1..21: mol_type = other RNA
tattagcatttgttttagccc

SEQ ID NO: 8549 - DNA, 25 bp, synthetic construct
  misc_feature 1..25: note = Description of Artificial Sequence: Syntheticoligonucleotide
  misc_feature 1..25: note = Description of Combined DNA/RNA Molecule: Syntheticoligonucleotide
  source 1..25: mol_type = other DNA
  modified_base order(5,15,20): mod_base = OTHER; note = Uracil
caggtcaagaggagtacagtgcaat

SEQ ID NO: 8550 - DNA, 25 bp, synthetic construct
  misc_feature 1..25: note = Description of Artificial Sequence: Syntheticoligonucleotide
  misc_feature 1..25: note = Description of Combined DNA/RNA Molecule: Syntheticoligonucleotide
  source 1..25: mol_type = other DNA
  modified_base order(5,8,15,20): mod_base = OTHER; note = Uracil
caggtcatgaggagtacagtgcaat
